(19) United States
(12) Patent Application Publication
(10) Pub. No.: US 2021/0052660 A1
(43) Pub. Date: Feb. 25, 2021

(54) NEURAL STEM CELL COMPOSITIONS INCLUDING CHIMERIC POXVIRUSES FOR CANCER TREATMENT

(71) Applicant: City of Hope, Duarte, CA (US)

(72) Inventors: Alexandra J. ANNALA, Duarte, CA (US); Karen S. ABOODY, Duarte, CA (US); Yuman FONG, Duarte, CA (US); Nanhai G. CHEN, Duarte, CA (US); Mohamed HAMMAD, Duarte, CA (US); Rachael MOONEY, Duarte, CA (US); Jennifer COVELLO, Duarte, CA (US)

(21) Appl. No.: 17/051,353

(22) PCT Filed: Apr. 30, 2019
(86) PCT No.: PCT/US19/30067

§ 371 Date: Oct. 28, 2020

Related U.S. Application Data
(60) Provisional application No. 62/664,269, filed on Apr. 30, 2018.
(60) Provisional application No. 62/672,511, filed on May 16, 2018.

(51) Int. Cl. A61K 35/30; A61P 35/00; A61K 35/768; A61K 9/00; C12N 15/11

(52) U.S. Cl. CPC A61K 35/30; A61P 35/00; C12N 15/11; A61K 9/0019; A61K 35/768

(57) ABSTRACT

Provided are methods and compositions for treating cancer with a combination of neural stem cells (NSCs) and a replication-competent oncolytic virus such as conditionally replication-competent chimeric orthopoxvirus (CF33). The cancer includes but is not limited to primary, recurrent, and metastatic brain cancer, breast cancer, head and neck cancer, bladder cancer, ovarian cancer, uterine cancer, prostate cancer, skin cancer, lung cancer, and colorectal cancer.

### CROSS-REFERENCES TO RELATED APPLICATIONS

[0001] This application claims the benefit of U.S. Provisional Application No. 62/664,269, filed Apr. 30, 2018, and U.S. Provisional Application No. 62/672,511, filed May 16, 2018 which are incorporated herein by reference in entirety and for all purposes

### STATEMENT AS TO RIGHTS TO INVENTIONS MADE UNDER FEDERALLY SPONSORED RESEARCH AND DEVELOPMENT

[0002] This invention was made with government support under grant no. 1R01CA197359-01 awarded by the National Institutes of Health. The government has certain rights in the invention.

### REFERENCE TO A “SEQUENCE LISTING,” A TABLE, OR A COMPUTER PROGRAM LISTING APPENDIX SUBMITTED AS AN ASCII FILE

[0003] The Sequence Listing written in file 048440-701001WO-SEQUENCE_LISTING_ST25, created on Apr. 30, 2019, 688,211 bytes, machine format IBM-PC, MS Windows operating system, is hereby incorporated by reference.

### BACKGROUND

[0004] Ovarian cancer is the most lethal gynecologic malignancy, afflicting approximately 22,000 women per year in the U.S. (Jemal et al., 2008; and Li et al., 2012). Once ovarian cancer has metastasized to the abdominal cavity (stage III), patients have only a 34% 5-year survival rate following standard treatment with surgical debulking and combination chemotherapy (e.g., cisplatin and paclitaxel) (Cannistra et al., 2004). Use of intraperitoneally (IP) delivered combination chemotherapy regimens has improved outcomes (Kim et al., 2015); however, these regimens frequently have complications and serious toxic side effects such that most patients are unable to complete the treatment cycles due to severe abdominal pain, nausea, and vomiting (Ding 2014). Furthermore, regardless of treatment regimen, most ovarian cancer patients eventually develop chemo-resistance, leading to cancer progression and death. Therefore, new, more targeted and effective therapeutic approaches for treating recurrent and/or drug-resistant ovarian cancer are needed. The methods and compositions provided herein address these and other needs in the art.

### BRIEF SUMMARY OF THE INVENTION

[0005] In one aspect, provided herein is a method of treating cancer with neural stem cells mediated delivery of a replication-competent oncolytic virus such as conditionally replication-competent chimeric orthopoxvirus CF33. The method entails administrating to a subject a therapeutically effective amount of neural stem cells and a replication-competent oncolytic virus. In some embodiments, the neural stem cells and the replication-competent oncolytic virus are administered simultaneously. In some embodiments, the neural stem cells and the replication-competent oncolytic virus are administered sequentially. In some embodiments, the neural stem cells and the oncolytic adenovirus are administered by injection, e.g., intraperitoneal injection. In some embodiments, the method further includes administering a therapeutically effective amount of anti-PD-L1, CTLA4 or OX40 to the subject, before, during, or after administration of the neural stem cells and the replication-competent oncolytic virus. In some embodiments, the neural stem cell is from a neural stem cell line HB1.F3.CD. In some embodiments, the neural stem cell is clonal human neural stem cell line HB1.F3.CD21. In some embodiments, the cancer is an intraperitoneal cancer including but not limited to, peritoneal cancer, ovarian cancer, bladder cancer, pancreatic cancer, colorectal cancer, gastric cancer, and liver cancer. In some embodiments, the cancer is metastatic ovarian cancer.

[0006] In a related aspect, disclosed herein is a pharmaceutical composition comprising a therapeutically effective amount of neural stem cells and a replication-competent oncolytic virus. In some embodiments, the virus is conditionally replication-competent chimeric orthopoxvirus CF33. In some embodiments, the neural stem cell is from a neural stem cell line HB1.F3.CD. In some embodiments, the neural stem cell is clonal human neural stem cell line HB1.F3.CD21. In some embodiments, the pharmaceutical composition further including a therapeutically effective amount of anti-PD-L1, CTLA4 or OX40. In some embodiments, the pharmaceutical composition further including one or more pharmaceutically acceptable carriers or excipients.

[0007] In another aspect is provided a method of treating cancer. The method includes administering to a subject in need thereof an effective amount of a chimeric poxvirus and a neural stem cell (NSC).

[0008] In another aspect is provided a composition including a chimeric poxvirus and a neural stem cell (NSC).

[0009] In another aspect is provided a neural stem cell (NSC) including a chimeric poxvirus.

[0010] In another aspect is provided a method of treating cancer. The method includes administering to a subject in need thereof an effective amount of a neural stem cell as described herein, including embodiments thereof.

### BRIEF DESCRIPTION OF THE DRAWINGS

[0011] FIG. 1A-1B. The figures show generation and evaluation of a novel chimeric poxvirus. Construction of CF33, validation of its cancer selectivity, and optimization of CF33 loading dose in NSCs. FIG. 1A: nu/nu mice bearing human OVCAR8 tumors were treated with chimeric orthopoxvirus CF33. Tumor volume was measured at days 0, 7, 14, 26, and 34 after treatment. FIG. 1B: Cell viability over time for MOIs ranging from 0.001 to 10 of CH33.

[0012] FIG. 2A-2I. The figures show IP administered NSCs are selectively tropic to peritoneal ovarian cancer metastases. Ex vivo images of (FIG. 2A) human OVCAR8.ffluc nu/nu immunodeficient model. (FIG. 2B) mouse ID8.tdTomato syngeneic C57Bl/6 immunocompetent model. Insets for FIG. 2A and FIG. 2B show harvested tumors ex vivo with bioluminescent imaging for ffluc. (FIG. 2C) Note predominance of metastases to omentum, diaphragm and peritoneal surface (FIGS. 2D-2H) Representative fluorescent images from harvested peritoneal tumors after NSC administration. (FIGS. 2D-2F) NSCs labeled with CellTracker CM-DiI (red) demonstrate distribution in tumor but not in adjacent normal kidney tissue (2×10⁶ NSC.DiI in 200 μL of PBS injected IP on day 38 and harvested 4 days post-NSC injection) (tumor labeled with eGFP, green), DAPI (nuclei blue). (FIGS. 2G-2H) NSCs with surface-conjugated nanoparticles (orange) demonstrate good distribution in tumor but not adjacent normal liver tissue (4×10⁶ NSC.NP in 1 mL of PBS injected IP on Day 13 and harvested 4 days post-NSC injection. Scale bar for panels FIG. 2D, 2G: 1000 μm; FIG. 2E, 2H: 500 μm, FIG. 2F, 2I: 200 μm.

[0013] FIG. 3A-3B. The figures show CF33 infects and kills ID8 mouse ovarian cancer cell line in vitro. Ovarian cancer cell lines are populated by CF33 NSCs in vitro. (FIG. 3A) CF33-eGFP NSCs co-cultured with ID8 cells (1:1000) infected tumor cells, as indicated by increased intensity of GFP until cells died. Intensity then decreased. NSCs cell not infected with CF33 do not exhibit any green fluorescence signal. (FIG. 3B) Graphical analysis of confluency mask for the cells in panel A showing that CF33 NSCs kill ID8 cell when co-cultured with them at a low NSC:tumor cell ratio (1:1000).

[0014] FIG. 4A-4B. The figures show CF33-NSC delivery of virus selectively to ovarian metastases. NSC-delivered chimeric orthopoxvirus CF33 preferentially infects IP ovarian tumors. OVCAR8 tumor-bearing nu/nu mice (n=5; 21 days post tumor implantation) were treated with IP CF33-NSCs (2×10⁶/200 μl/mouse; 5 i.u./cell). Tumors with adjacent tissue were harvested 2 days later. (FIG. 4A) Representative micrograph of a tumor mass (black dotted line) stained with ffluc antibody-DAB (brown). (FIG. 4B) Sister serial section of the section shown in A stained with an anti-pox antibody-DAB (brown). This staining pattern suggests that CF33 delivered by NSCs spreads through tumors from the periphery inwards (black arrows). Scale bars: 200 μm

[0015] FIG. 5A-5D. The figure shows NSCs improved distribution of CF33 in vivo. NSCs selectively seed CF33 in ovarian tumors with improved distribution over free CF33 in immunocompetent model. C57Bl/6 mice with established IP ID8 tumors with CF33-NSCs (2×10⁶) or free CF33 with matched viral load 3×10⁶ plaque forming units (PFU), or PBS control. Immunofluorescence staining with antivaccinia Ab (red) confirmed transfer of CF33 to tumor (green) in the CF33-NSC group (FIG. 5A) and free CF33 group (FIG. 5B) with matched viral loads (3×10⁶ pfu/mouse), compared with the untreated group (FIG. 5C), 4 days after 1st treatment. Scale bar=100 μm, (FIG. 5D) NSCs localize to IP ovarian tumor foci within 1 hour after administration. % AuNR was quantified by ICP mass spectroscopy. No significant difference was detected between 1 and 72 hours post AuNRNSC administration.

[0016] FIG. 6. The figure shows NSCs shielded CF33 from immune neutralization. NSCs appear to shield CF33 from immune neutralization. In vivo BLI of C57Bl/6 mice with established ID8 peritoneal metastases 1 hour after treatment with free CF33.ffluc (left) or CF33.ffluc-NSCs (right). Bottom panels show BLI 1 hour after a 2nd treatment round given 1 week later. Graph shows quantification of CF33.ffluc BLI signal. Note CF33 delivered by NSCs shows significant increase in viral load at tumor sites 1 h after both 1st (p=0.0193) and 2^{nd}.

[0017] FIG. 7. The figure shows NSCs improved CF33 distribution even for 24 hours after 2^{nd} treatment round. NSC-mediated viral distribution to IP ovarian metastases is enhanced 1 day after 2nd treatment. C57BL/6 mice received IP ID8 ovarian cancer cells (5×10⁶/200 μl/mouse). Treatments were given at 3 weeks and 6 weeks after tumor establishment, with matched viral load for CF33-NSCs and CF33 (1×10⁷ CF33 PFU in 2×10⁶ NSCs). Virus retention at individual ovarian tumor foci 1 day post treatment was greater after a 2^{nd} round of treatment.

[0018] FIG. 8. The figure shows free novel chimeric orthpoxviruses show superior tumoricidal activity in NCI-60 cell lines.

[0019] FIG. 9. The figure shows free novel chimeric orthopoxvirus shrinks triple-negative breast cancer. The viral dose used was 2-5 orders of magnitude lower than the oncolytic viruses under clinical testing.

[0020] FIG. 10. The figure shows free novel chimeric poxvirus (HOV) inhibits the growth of distant, untreated tumors from NCI-60 cancer cell lines.

[0021] FIG. 11. The figure shows free novel chimeric poxvirus (HOV) infects fresh human triple-negative breast cancer ex vivo. GFP version of the novel chimeric poxvirus.

[0022] FIG. 12. The figure shows in vitro cytotoxicity and viral replication of free chimeric orthopoxvirus CF33-Fluc in pancreatic cancer cell lines.

[0023] FIG. 13. The figure shows free CF33 causes regression of both injected and non-injected distant tumors at a low dose in pancreatic xenograft models.

[0024] FIG. 14A-14C. The figure shows virus-encoded luciferase activity correlates with tumor regression over time. Virus is distributed to distant non-injected tumors as measured by virus-encoded luciferase activity (FIG. 14A). Decrease in tumor size correlates with virus-encoded luciferase activity (FIG. 14B). Increasing viral titers are observed in non-injected tumors, showing good distribution of CF33-Fluc (FIG. 14C).

[0025] FIG. 15. The figure shows histology and immunochemistry of tumor sections confirm killing of free CF33-Fluc injected and non-injected, distant tumors.

[0026] FIG. 16. The figure shows free CF33 shrinks ovarian cancer as demonstrated by decrease in tumor volume.

[0027] FIG. 17. The figure shows a schematic map of available viruses used for the methods and compositions provided herein.

[0028] FIG. 18. The figure shows in vitro comparative tumor killing study. Compared CF33 EGFP (black circle), CF33 Hs-Luc2 (gray asterisk), CF33 11K-Luc2 (black square), CF17 (black triangle), CF189 (gray triangle), and a control (gray diamond) for tumor killing of ID8 (mouse ovarian cancer) and ovcar8 (human ovarian cancer) at various MOIs (1:10, 1:100 and 1:1000).

[0029] FIG. 19A-19B. The figure shows in vitro NSC-CF33.11k-Luc Viability Post Incubation (FIG. 19A). NSC-CF33.11K-Luc Viability Post Thaw (FIG. 19B).

[0030] FIG. 20. The figure shows the experimental design to determine the efficacy of checkpoint inhibitors anti-PD-1, anti-CTLA-4, or a combination thereof. Tumor inoculation (ID8 ovarian CBR LUC) occurred at day 0, with 4×10⁶ in 100 μl PBS/IP injected intraperitoneally (i.p.). The checkpoint inhibitors are administered at indicated times (day 0 (DO), day 4 (D4), day 5 (D5), day 7 (D7), day 9 (D9) or day 14 (D14), respectively) after tumor inoculation and treatment with free CF33 or NSC-CF33. On day 4, either CF33/11K-Luc2 NSCs 2×10⁶ or free CF33/11k-Luc2 were injected i.p. On day 5, either PD-1 Ab, CTLA-4 Ab or a combination thereof was administered. On day 7, either PD-1 Ab or a combination of PD-1Ab and CTLA-4 Ab was administered. On day 9, either PD-1 Ab or a combination of PD-1Ab and CTLA-4 Ab was administered. On day 14, either CF33/11K-Luc2 NSCs 2×10⁶ or free CF33/11k-Luc2 were injected i.p.

[0031] FIG. 21. The figure shows CF33 mCherry NSCs remarkably seeded more CF33 in a glioblastoma syngeneic immunocompetent mouse model after 1 round of IV injection compared with free CF33 mCherry. Brains were harvested 2 days after IV injection, n=2 mice/group.

[0032] FIG. 22. The figure shows CF33 upregulates PD-L1 expression in ID8 tumor cells in vitro. Flow Cytometry for PD-L1 expression in ID8 tumor cells. ID8 cells in vitro were treated with 0.5 M cisplatin and CF33-NSCs at a ratio of 1:1000 and 1:100. Treated cells were harvested after 2 days of culture and stained with a PE PD-L1 monoclonal antibody for FACS analysis. Significant upregulation of PD-L1 was noted in ID8 cells exposed to CF33-NSCs at MOIs of 0.001 and 0.01. PD-L1 monoclonal antibody clone 10F.9G2 was purchased from BioLegend (San Diego, Calif.) Cells were analyzed by a Guava easyCyte HT flow cytometer using InCyte and FCS Express 6 software.

[0033] FIG. 23. The figure shows OV-VAC 17-04 Tumor Challenge Schema. Tumor Challenge includes implanting ID8 ovarian LV TDTOM 1.0×10⁶ by i.p. injection of 14 week old female C57BL6 mice on day 0 (DO). Treatment rounds 1, 2 and 3 are administered at indicated times (day 28 (D28), day 35 (D35), and day 42 (D42), respectively) after tumor inoculation. Treatment rounds include i.p. injection of 500 uL of either 3.0×10⁶ pfu virus or 2.0×10⁶ NSCs-Virus in 2 groups of 4 mice per group. Whole body bioluminescent imaging (BLI) is completed at indicated intervals following treatment, days 28, 29, 30, 31, and 32 (D28, 29, 30, 31, and 32), days 35, 36, 37, 38, and 39 (D35, 36, 37, 38, and 39), and days 42, 43, 44, 45, and 46 (D42, 43, 44, 45, and 46). Mice are euthanized on day 65 (D65). Harvesting is conducted post-euthanization by collecting the pluck, diaphragm and peritoneal fluid.

[0034] FIG. 24. The figure shows mouse plasma carbohydrate antigen 125 (CA125) levels pre and post tumor implantation, and post treatment with either free FFluc-CF33 or FFluc-CF33 carried by NSCs.

[0035] FIG. 25. The figure shows combination of CF33-NSC and PD-1 blockade remarkably prolonged survival in a syngeneic mouse model of ovarian cancer.

[0036] FIG. 26. The figure shows combined oncolytic virus and checkpoint blockade therapy is highly effective against cancer.

[0037] FIG. 27. The figure shows bioluminescent measurements post tumor implantation following treatment with free CF33 virus, CF33-NSC, immune checkpoint inhibitor PD-1 Ab, and sequential treatment of CF33-NSC and PD-1 Ab.

### DETAILED DESCRIPTION

[0038] Methods for treating cancer using tropic cells (e.g., stem cells or neural stem cells (NSCs)) that carry a replication-competent oncolytic virus are provided herein. In some embodiments, the virus is conditionally replication-competent chimeric orthopoxvirus CF33. In some embodiments, the virus is conditionally replication-competent chimeric orthopoxvirus CF17. In some embodiments, the NSCs are HB1.F3.CD21. Such methods may be used to treat an intraperitoneal cancer capable of being treated via intraperitoneal (IP) injection including but not limited to, peritoneal cancer, ovarian cancer, bladder cancer, pancreatic cancer, colorectal cancer, gastric cancer, and liver cancer. In some embodiments, the cancer is metastatic ovarian cancer.

[0039] Replication-competent oncolytic virotherapy offers a new, highly promising approach for treating ovarian cancer. Once seeded into the tumor, the oncolytic virus can selectively replicate in tumor cells (but not in normal tissue) to destroy tumor cells in situ via direct lysis. Importantly, oncolytic viruses can induce cancer cell death irrespective of radio- or chemoresistance and can also stimulate immune system recognition of cancer cells by exposing tumor antigens upon lysis. Clinical efficacy of this approach has been limited by rapid viral inactivation by the immune system, poor viral penetration of tumors, and an inability of the virus to effectively reach invasive metastatic foci separated by normal tissue.

[0040] Disclosed herein is a novel conditionally replication-competent chimeric orthopoxviruses (CF33 and CF17) selected specifically for ovarian cancer cell infection, following screening of over 100 chimeric poxviruses. The CF33 virus was engineered to be tumor specific by deleting the virus's thymidine kinase (TK) gene. Tumor tissues have abnormally high TK expression that complements this gene deletion, permitting viral replication, whereas normal tissue does not. The chimeric poxviruses viruses (e.g., CF33 and CF17) described in PCT Application Publication No. WO 2018/031694, entitled “Chimeric Poxvirus Compositions and Uses Thereof,” which is hereby incorporated by reference in its entirety and for all purposes, may be used for the methods and compositions provided herein. Some examples of the CF33 viruses used herein include CF33/SE-HNIS ANTI-PDL1, CF33/H5-FFLUC, CF33/H5-MCHERRY, and CF33/H5-EMERALD GFP.

[0041] As disclosed herein a modified tumor-tropic, HLA II-negative neural stem cell line (HB1.F3.CD21 NSCs; demonstrating clinical safety in high-grade glioma patients)^{[20,95]} efficiently delivers CF33 to ovarian cancer foci in preclinical models. NSCs provide protection from immune-mediated clearance and neutralization to achieve effective viral distribution to peritoneal ovarian tumors. Co-culture in vitro experiments of NSC-delivered CF33 in human OVCAR8 and murine ID8 ovarian cancer cells showed robust infection of >95% of tumor cells in 6 days, even at a low ratio of 1 NSC:1000 tumor cells. In vivo data show selective distribution of NSC-delivered CF33 to human OVCAR8 and ID8 peritoneal metastases in immunodeficient and immunocompetent mice, respectively. Furthermore, IP-delivered CF33-NSCs showed increased viral distribution to tumor sites (assessed by BLI, IHC, and qPCR) compared to a matched viral load of free CF33 when multiple treatment rounds were given in the immunocompetent model. Long-term efficacy studies can establish the clearance kinetics, immune response, viral distribution, and efficacy of NSC-delivered vs. free CF33. CF33-NSCs can be used for selective tumor killing in patients suffering from various cancers, including stage III ovarian cancer.

### I. Definitions

[0042] While various embodiments and aspects of the present invention are shown and described herein, it will be obvious to those skilled in the art that such embodiments and aspects are provided by way of example only. Numerous variations, changes, and substitutions will now occur to those skilled in the art without departing from the invention. It should be understood that various alternatives to the embodiments of the invention described herein may be employed in practicing the invention.

[0043] The section headings used herein are for organizational purposes only and are not to be construed as limiting the subject matter described. All documents, or portions of documents, cited in the application including, without limitation, patents, patent applications, articles, books, manuals, and treatises are hereby expressly incorporated by reference in their entirety for any purpose.

[0044] Unless defined otherwise, technical and scientific terms used herein have the same meaning as commonly understood by a person of ordinary skill in the art. See, e.g., Singleton et al., DICTIONARY OF MICROBIOLOGY AND MOLECULAR BIOLOGY 2nd ed., J. Wiley & Sons (New York, N.Y. 1994); Sambrook et al., MOLECULAR CLONING, A LABORATORY MANUAL, Cold Springs Harbor Press (Cold Springs Harbor, N Y 1989). Any methods, devices and materials similar or equivalent to those described herein can be used in the practice of this invention. The following definitions are provided to facilitate understanding of certain terms used frequently herein and are not meant to limit the scope of the present disclosure.

[0045] An amino acid residue in a protein “corresponds” to a given residue when it occupies the same essential structural position within the protein as the given residue.

[0046] The terms “isolate” or “isolated”, when applied to a nucleic acid, virus, or protein, denotes that the nucleic acid, virus, or protein is essentially free of other cellular components with which it is associated in the natural state. It can be, for example, in a homogeneous state and may be in either a dry or aqueous solution. Purity and homogeneity are typically determined using analytical chemistry techniques such as polyacrylamide gel electrophoresis or high performance liquid chromatography. A protein that is the predominant species present in a preparation is substantially purified.

[0047] The term “amino acid” refers to naturally occurring and synthetic amino acids, as well as amino acid analogs and amino acid mimetics that function in a manner similar to the naturally occurring amino acids. Naturally occurring amino acids are those encoded by the genetic code, as well as those amino acids that are later modified, e.g., hydroxyproline, γ-carboxyglutamate, and O-phosphoserine Amino acid analogs refers to compounds that have the same basic chemical structure as a naturally occurring amino acid, i.e., an a carbon that is bound to a hydrogen, a carboxyl group, an amino group, and an R group, e.g., homoserine, norleucine, methionine sulfoxide, methionine methyl sulfonium. Such analogs have modified R groups (e.g., norleucine) or modified peptide backbones, but retain the same basic chemical structure as a naturally occurring amino acid Amino acid mimetics refers to chemical compounds that have a structure that is different from the general chemical structure of an amino acid, but that functions in a manner similar to a naturally occurring amino acid. The terms “non-naturally occurring amino acid” and “unnatural amino acid” refer to amino acid analogs, synthetic amino acids, and amino acid mimetics which are not found in nature.

[0048] Amino acids may be referred to herein by either their commonly known three letter symbols or by the one-letter symbols recommended by the IUPAC-IUB Biochemical Nomenclature Commission. Nucleotides, likewise, may be referred to by their commonly accepted single-letter codes.

[0049] The terms “polypeptide,” “peptide” and “protein” are used interchangeably herein to refer to a polymer of amino acid residues, wherein the polymer may In embodiments be conjugated to a moiety that does not consist of amino acids. The terms apply to amino acid polymers in which one or more amino acid residue is an artificial chemical mimetic of a corresponding naturally occurring amino acid, as well as to naturally occurring amino acid polymers and non-naturally occurring amino acid polymers. A “fusion protein” refers to a chimeric protein encoding two or more separate protein sequences that are recombinantly expressed as a single moiety.

[0050] The term “peptidyl” and “peptidyl moiety” means a monovalent peptide.

[0051] A “ligand” refers to an agent, e.g., a polypeptide or other molecule, capable of binding to a receptor.

[0052] As may be used herein, the terms “nucleic acid,” “nucleic acid molecule,” “nucleic acid oligomer,” “oligonucleotide,” “nucleic acid sequence,” “nucleic acid fragment” and “polynucleotide” are used interchangeably and are intended to include, but are not limited to, a polymeric form of nucleotides covalently linked together that may have various lengths, either deoxyribonucleotides or ribonucleotides, or analogs, derivatives or modifications thereof. Different polynucleotides may have different three-dimensional structures, and may perform various functions, known or unknown. Non-limiting examples of polynucleotides include a gene, a gene fragment, an exon, an intron, intergenic DNA (including, without limitation, heterochromatic DNA), messenger RNA (mRNA), transfer RNA, ribosomal RNA, a ribozyme, cDNA, a recombinant polynucleotide, a branched polynucleotide, a plasmid, a vector, isolated DNA of a sequence, isolated RNA of a sequence, a nucleic acid probe, and a primer. Polynucleotides useful in the methods of the disclosure may comprise natural nucleic acid sequences and variants thereof, artificial nucleic acid sequences, or a combination of such sequences.

[0053] A polynucleotide is typically composed of a specific sequence of four nucleotide bases: adenine (A); cytosine (C); guanine (G); and thymine (T) (uracil (U) for thymine (T) when the polynucleotide is RNA). Thus, the term “polynucleotide sequence” is the alphabetical representation of a polynucleotide molecule; alternatively, the term may be applied to the polynucleotide molecule itself. This alphabetical representation can be input into databases in a computer having a central processing unit and used for bioinformatics applications such as functional genomics and homology searching. Polynucleotides may optionally include one or more non-standard nucleotide(s), nucleotide analog(s) and/or modified nucleotides.

[0054] “Conservatively modified variants” applies to both amino acid and nucleic acid sequences. With respect to particular nucleic acid sequences, “conservatively modified variants” refers to those nucleic acids that encode identical or essentially identical amino acid sequences. Because of the degeneracy of the genetic code, a number of nucleic acid sequences will encode any given protein. For instance, the codons GCA, GCC, GCG and GCU all encode the amino acid alanine. Thus, at every position where an alanine is specified by a codon, the codon can be altered to any of the corresponding codons described without altering the encoded polypeptide. Such nucleic acid variations are “silent variations,” which are one species of conservatively modified variations. Every nucleic acid sequence herein which encodes a polypeptide also describes every possible silent variation of the nucleic acid. One of skill will recognize that each codon in a nucleic acid (except AUG, which is ordinarily the only codon for methionine, and TGG, which is ordinarily the only codon for tryptophan) can be modified to yield a functionally identical molecule. Accordingly, each silent variation of a nucleic acid which encodes a polypeptide is implicit in each described sequence.

[0055] “Nucleic acid” refers to nucleotides (e.g., deoxyribonucleotides or ribonucleotides) and polymers thereof in either single-, double- or multiple-stranded form, or complements thereof; or nucleosides (e.g., deoxyribonucleosides or ribonucleosides). In embodiments, “nucleic acid” does not include nucleosides. The terms “polynucleotide,” “oligonucleotide,” “oligo” or the like refer, in the usual and customary sense, to a linear sequence of nucleotides. The term “nucleoside” refers, in the usual and customary sense, to a glycosylamine including a nucleobase and a five-carbon sugar (ribose or deoxyribose). Non limiting examples, of nucleosides include, cytidine, uridine, adenosine, guanosine, thymidine and inosine. The term “nucleotide” refers, in the usual and customary sense, to a single unit of a polynucleotide, i.e., a monomer. Nucleotides can be ribonucleotides, deoxyribonucleotides, or modified versions thereof. Examples of polynucleotides contemplated herein include single and double stranded DNA, single and double stranded RNA, and hybrid molecules having mixtures of single and double stranded DNA and RNA. Examples of nucleic acid, e.g. polynucleotides contemplated herein include any types of RNA, e.g. mRNA, siRNA, miRNA, and guide RNA and any types of DNA, genomic DNA, plasmid DNA, and minicircle DNA, and any fragments thereof. The term “duplex” in the context of polynucleotides refers, in the usual and customary sense, to double strandedness. Nucleic acids can be linear or branched. For example, nucleic acids can be a linear chain of nucleotides or the nucleic acids can be branched, e.g., such that the nucleic acids comprise one or more arms or branches of nucleotides. Optionally, the branched nucleic acids are repetitively branched to form higher ordered structures such as dendrimers and the like.

[0056] Nucleic acids, including e.g., nucleic acids with a phosphothioate backbone, can include one or more reactive moieties. As used herein, the term reactive moiety includes any group capable of reacting with another molecule, e.g., a nucleic acid or polypeptide through covalent, non-covalent or other interactions. By way of example, the nucleic acid can include an amino acid reactive moiety that reacts with an amino acid on a protein or polypeptide through a covalent, non-covalent or other interaction.

[0057] The terms also encompass nucleic acids containing known nucleotide analogs or modified backbone residues or linkages, which are synthetic, naturally occurring, and non-naturally occurring, which have similar binding properties as the reference nucleic acid, and which are metabolized in a manner similar to the reference nucleotides. Examples of such analogs include, without limitation, phosphodiester derivatives including, e.g., phosphoramidate, phosphorodiamidate, phosphorothioate (also known as phosphothioate having double bonded sulfur replacing oxygen in the phosphate), phosphorodithioate, phosphonocarboxylic acids, phosphonocarboxylates, phosphonoacetic acid, phosphonoformic acid, methyl phosphonate, boron phosphonate, or O-methylphosphoroamidite linkages (see Eckstein, OLIGONUCLEOTIDES AND ANALOGUES: A PRACTICAL APPROACH, Oxford University Press) as well as modifications to the nucleotide bases such as in 5-methyl cytidine or pseudouridine.; and peptide nucleic acid backbones and linkages. Other analog nucleic acids include those with positive backbones; non-ionic backbones, modified sugars, and non-ribose backbones (e.g. phosphorodiamidate morpholino oligos or locked nucleic acids (LNA) as known in the art), including those described in U.S. Pat. Nos. 5,235,033 and 5,034,506, and Chapters 6 and 7, ASC Symposium Series 580, CARBOHYDRATE MODIFICATIONS IN ANTISENSE RESEARCH, Sanghui & Cook, eds. Nucleic acids containing one or more carbocyclic sugars are also included within one definition of nucleic acids. Modifications of the ribose-phosphate backbone may be done for a variety of reasons, e.g., to increase the stability and half-life of such molecules in physiological environments or as probes on a biochip. Mixtures of naturally occurring nucleic acids and analogs can be made; alternatively, mixtures of different nucleic acid analogs, and mixtures of naturally occurring nucleic acids and analogs may be made. In embodiments, the internucleotide linkages in DNA are phosphodiester, phosphodiester derivatives, or a combination of both.

[0058] Nucleic acids can include nonspecific sequences. As used herein, the term “nonspecific sequence” refers to a nucleic acid sequence that contains a series of residues that are not designed to be complementary to or are only partially complementary to any other nucleic acid sequence. By way of example, a nonspecific nucleic acid sequence is a sequence of nucleic acid residues that does not function as an inhibitory nucleic acid when contacted with a cell or organism.

[0059] A “labeled nucleic acid or oligonucleotide” is one that is bound, either covalently, through a linker or a chemical bond, or noncovalently, through ionic, van der Waals, electrostatic, or hydrogen bonds to a label such that the presence of the nucleic acid may be detected by detecting the presence of the detectable label bound to the nucleic acid. Alternatively, a method using high affinity interactions may achieve the same results where one of a pair of binding partners binds to the other, e.g., biotin, streptavidin. In embodiments, the phosphorothioate nucleic acid or phosphorothioate polymer backbone includes a detectable label, as disclosed herein and generally known in the art.

[0060] As to amino acid sequences, one of skill will recognize that individual substitutions, deletions or additions to a nucleic acid, peptide, polypeptide, or protein sequence which alters, adds or deletes a single amino acid or a small percentage of amino acids in the encoded sequence is a “conservatively modified variant” where the alteration results in the substitution of an amino acid with a chemically similar amino acid. Conservative substitution tables providing functionally similar amino acids are well known in the art. Such conservatively modified variants are in addition to and do not exclude polymorphic variants, interspecies homologs, and alleles of the disclosure.

[0061] The following eight groups each contain amino acids that are conservative substitutions for one another:

### 1) Alanine (A), Glycine (G);

[0062] 2) Aspartic acid (D), Glutamic acid (E);

### 3) Asparagine (N), Glutamine (Q);

### 4) Arginine (R), Lysine (K);

### 5) Isoleucine (I), Leucine (L), Methionine (M), Valine (V);

### 6) Phenylalanine (F), Tyrosine (Y), Tryptophan (W);

### 7) Serine (S), Threonine (T); and

### 8) Cysteine (C), Methionine (M)

[0063] (see, e.g., Creighton, Proteins (1984)).

[0064] The term “bispecific T-cell engager (BiTE)”, “BiTe” or “bispecific antibody” as provided herein is used according to its conventional meaning well known in the art and refers to a bispecific recombinant protein capable to simultaneously bind to two different antigens. In contrast to traditional monoclonal antibodies, BiTE antibodies consist of two independently different antibody regions (e.g., two single-chain variable fragments (scFv)), each of which binds a different antigen. One antibody region engages effector cells (e.g., T cells) by binding an effector cell-specific antigen (e.g., CD3 molecule) and the second antibody region binds a target cell (e.g., cancer cell or autoimmune-reactive cell) through a cell surface antigen (e.g., BAFF-R) expressed by said target cell. Binding of the BiTE to the two antigens will link the effector cell (e.g., T cell) to the target cell (e.g., tumor cell) and activate the effector cell (e.g., T cell) via effector cell-specific antigen signaling (e.g., CD3 signaling). The activated effector cell (e.g., T cell) will then exert cytotoxic activity against the target cell (e.g., tumor cells).

[0065] “Percentage of sequence identity” is determined by comparing two optimally aligned sequences over a comparison window, wherein the portion of the polynucleotide or polypeptide sequence in the comparison window may comprise additions or deletions (i.e., gaps) as compared to the reference sequence (which does not comprise additions or deletions) for optimal alignment of the two sequences. The percentage is calculated by determining the number of positions at which the identical nucleic acid base or amino acid residue occurs in both sequences to yield the number of matched positions, dividing the number of matched positions by the total number of positions in the window of comparison and multiplying the result by 100 to yield the percentage of sequence identity.

[0066] The terms “identical” or percent “identity,” in the context of two or more nucleic acids or polypeptide sequences, refer to two or more sequences or subsequences that are the same or have a specified percentage of amino acid residues or nucleotides that are the same (i.e., about 60% identity, preferably 65%, 70%, 75%, 80%, 85%, 90%, 91%, 92%, 93%, 94%, 95%, 96%, 97%, 98%, 99%, or higher identity over a specified region, when compared and aligned for maximum correspondence over a comparison window or designated region) as measured using a BLAST or BLAST 2.0 sequence comparison algorithms with default parameters described below, or by manual alignment and visual inspection (see, e.g., NCBI web site http://www.ncbi.nlm.nih.gov/BLAST/ or the like). Such sequences are then said to be “substantially identical.” This definition also refers to, or may be applied to, the compliment of a test sequence. The definition also includes sequences that have deletions and/or additions, as well as those that have substitutions. As described below, the preferred algorithms can account for gaps and the like. Preferably, identity exists over a region that is at least about 25 amino acids or nucleotides in length, or more preferably over a region that is 50-100 amino acids or nucleotides in length.

[0067] An amino acid or nucleotide base “position” is denoted by a number that sequentially identifies each amino acid (or nucleotide base) in the reference sequence based on its position relative to the N-terminus (or 5′-end). Due to deletions, insertions, truncations, fusions, and the like that must be taken into account when determining an optimal alignment, in general the amino acid residue number in a test sequence determined by simply counting from the N-terminus will not necessarily be the same as the number of its corresponding position in the reference sequence. For example, in a case where a variant has a deletion relative to an aligned reference sequence, there will be no amino acid in the variant that corresponds to a position in the reference sequence at the site of deletion. Where there is an insertion in an aligned reference sequence, that insertion will not correspond to a numbered amino acid position in the reference sequence. In the case of truncations or fusions there can be stretches of amino acids in either the reference or aligned sequence that do not correspond to any amino acid in the corresponding sequence.

[0068] The terms “numbered with reference to” or “corresponding to,” when used in the context of the numbering of a given amino acid or polynucleotide sequence, refers to the numbering of the residues of a specified reference sequence when the given amino acid or polynucleotide sequence is compared to the reference sequence.

[0069] An “antisense nucleic acid” as referred to herein is a nucleic acid (e.g., DNA or RNA molecule) that is complementary to at least a portion of a specific target nucleic acid and is capable of reducing transcription of the target nucleic acid (e.g. mRNA from DNA), reducing the translation of the target nucleic acid (e.g. mRNA), altering transcript splicing (e.g. single stranded morpholino oligo), or interfering with the endogenous activity of the target nucleic acid. See, e.g., Weintraub, Scientific American, 262:40 (1990). Typically, synthetic antisense nucleic acids (e.g. oligonucleotides) are generally between 15 and 25 bases in length. Thus, antisense nucleic acids are capable of hybridizing to (e.g. selectively hybridizing to) a target nucleic acid. In embodiments, the antisense nucleic acid hybridizes to the target nucleic acid in vitro. In embodiments, the antisense nucleic acid hybridizes to the target nucleic acid in a cell. In embodiments, the antisense nucleic acid hybridizes to the target nucleic acid in an organism. In embodiments, the antisense nucleic acid hybridizes to the target nucleic acid under physiological conditions. Antisense nucleic acids may comprise naturally occurring nucleotides or modified nucleotides such as, e.g., phosphorothioate, methylphosphonate, and -anomeric sugar-phosphate, backbonemodified nucleotides.

[0070] In the cell, the antisense nucleic acids hybridize to the corresponding RNA forming a double-stranded molecule. The antisense nucleic acids interfere with the endogenous behavior of the RNA and inhibit its function relative to the absence of the antisense nucleic acid. Furthermore, the double-stranded molecule may be degraded via the RNAi pathway. The use of antisense methods to inhibit the in vitro translation of genes is well known in the art (Marcus-Sakura, Anal. Biochem., 172:289, (1988)). Further, antisense molecules which bind directly to the DNA may be used. Antisense nucleic acids may be single or double stranded nucleic acids. Non-limiting examples of antisense nucleic acids include siRNAs (including their derivatives or pre-cursors, such as nucleotide analogs), short hairpin RNAs (shRNA), micro RNAs (miRNA), saRNAs (small activating RNAs) and small nucleolar RNAs (snoRNA) or certain of their derivatives or pre-cursors.

[0071] The term “complement,” as used herein, refers to a nucleotide (e.g., RNA or DNA) or a sequence of nucleotides capable of base pairing with a complementary nucleotide or sequence of nucleotides. As described herein and commonly known in the art the complementary (matching) nucleotide of adenosine is thymidine and the complementary (matching) nucleotide of guanosine is cytosine. Thus, a complement may include a sequence of nucleotides that base pair with corresponding complementary nucleotides of a second nucleic acid sequence. The nucleotides of a complement may partially or completely match the nucleotides of the second nucleic acid sequence. Where the nucleotides of the complement completely match each nucleotide of the second nucleic acid sequence, the complement forms base pairs with each nucleotide of the second nucleic acid sequence. Where the nucleotides of the complement partially match the nucleotides of the second nucleic acid sequence only some of the nucleotides of the complement form base pairs with nucleotides of the second nucleic acid sequence. Examples of complementary sequences include coding and a non-coding sequences, wherein the non-coding sequence contains complementary nucleotides to the coding sequence and thus forms the complement of the coding sequence. A further example of complementary sequences are sense and antisense sequences, wherein the sense sequence contains complementary nucleotides to the antisense sequence and thus forms the complement of the antisense sequence.

[0072] As described herein the complementarity of sequences may be partial, in which only some of the nucleic acids match according to base pairing, or complete, where all the nucleic acids match according to base pairing. Thus, two sequences that are complementary to each other, may have a specified percentage of nucleotides that are the same (i.e., about 60% identity, preferably 65%, 70%, 75%, 80%, 85%, 90%, 91%, 92%, 93%, 94%, 95%, 96%, 97%, 98%, 99%, or higher identity over a specified region).

[0073] Nucleic acid is “operably linked” when it is placed into a functional relationship with another nucleic acid sequence. For example, DNA for a presequence or secretory leader is operably linked to DNA for a polypeptide if it is expressed as a preprotein that participates in the secretion of the polypeptide; a promoter or enhancer is operably linked to a coding sequence if it affects the transcription of the sequence; or a ribosome binding site is operably linked to a coding sequence if it is positioned so as to facilitate translation. Generally, “operably linked” means that the DNA sequences being linked are near each other, and, in the case of a secretory leader, contiguous and in reading phase. However, enhancers do not have to be contiguous. Linking is accomplished by ligation at convenient restriction sites. If such sites do not exist, the synthetic oligonucleotide adaptors or linkers are used in accordance with conventional practice.

[0074] The term “gene” means the segment of DNA involved in producing a protein; it includes regions preceding and following the coding region (leader and trailer) as well as intervening sequences (introns) between individual coding segments (exons). The leader, the trailer as well as the introns include regulatory elements that are necessary during the transcription and the translation of a gene. Further, a “protein gene product” is a protein expressed from a particular gene.

[0075] The word “expression” or “expressed” as used herein in reference to a gene means the transcriptional and/or translational product of that gene. The level of expression of a DNA molecule in a cell may be determined on the basis of either the amount of corresponding mRNA that is present within the cell or the amount of protein encoded by that DNA produced by the cell. The level of expression of non-coding nucleic acid molecules (e.g., siRNA) may be detected by standard PCR or Northern blot methods well known in the art. See, Sambrook et al., 1989 Molecular Cloning: A Laboratory Manual, 18.1-18.88.

[0076] A “siRNA,” “small interfering RNA,” “small RNA,” or “RNAi” as provided herein refers to a nucleic acid that forms a double stranded RNA, which double stranded RNA has the ability to reduce or inhibit expression of a gene or target gene when expressed in the same cell as the gene or target gene. The complementary portions of the nucleic acid that hybridize to form the double stranded molecule typically have substantial or complete identity. In one embodiment, a siRNA or RNAi refers to a nucleic acid that has substantial or complete identity to a target gene and forms a double stranded siRNA. In embodiments, the siRNA inhibits gene expression by interacting with a complementary cellular mRNA thereby interfering with the expression of the complementary mRNA. Typically, the nucleic acid is at least about 15-50 nucleotides in length (e.g., each complementary sequence of the double stranded siRNA is 15-50 nucleotides in length, and the double stranded siRNA is about 15-50 base pairs in length). In other embodiments, the length is 20-30 base nucleotides, preferably about 20-25 or about 24-29 nucleotides in length, e.g., 20, 21, 22, 23, 24, 25, 26, 27, 28, 29, or 30 nucleotides in length. Non-limiting examples of siRNAs include ribozymes, RNA decoys, short hairpin RNAs (shRNA), micro RNAs (miRNA) and small nucleolar RNAs (snoRNA).

[0077] The term “recombinant” when used with reference, e.g., to a cell, or nucleic acid, protein, or vector, indicates that the cell, nucleic acid, protein or vector, has been modified by the introduction of a heterologous nucleic acid or protein or the alteration of a native nucleic acid or protein, or that the cell is derived from a cell so modified. Thus, for example, recombinant cells express genes that are not found within the native (non-recombinant) form of the cell or express native genes that are otherwise abnormally expressed, under expressed or not expressed at all. Transgenic cells and plants are those that express a heterologous gene or coding sequence, typically as a result of recombinant methods.

[0078] The term “heterologous” when used with reference to portions of a nucleic acid indicates that the nucleic acid including two or more subsequences that are not found in the same relationship to each other in nature. For instance, the nucleic acid is typically recombinantly produced, having two or more sequences from unrelated genes arranged to make a new functional nucleic acid, e.g., a promoter from one source and a coding region from another source. Similarly, a heterologous protein indicates that the protein including two or more subsequences that are not found in the same relationship to each other in nature (e.g., a fusion protein).

[0079] The term “exogenous” refers to a molecule or substance (e.g., a compound, nucleic acid or protein) that originates from outside a given cell or organism. For example, an “exogenous promoter” as referred to herein is a promoter that does not originate from the cell or organism it is expressed by. Conversely, the term “endogenous” or “endogenous promoter” refers to a molecule or substance that is native to, or originates within, a given cell or organism.

[0080] The term “antibody” refers to a polypeptide encoded by an immunoglobulin gene or functional fragments thereof that specifically binds and recognizes an antigen. The recognized immunoglobulin genes include the kappa, lambda, alpha, gamma, delta, epsilon, and mu constant region genes, as well as the myriad immunoglobulin variable region genes. Light chains are classified as either kappa or lambda. Heavy chains are classified as gamma, mu, alpha, delta, or epsilon, which in turn define the immunoglobulin classes, IgG, IgM, IgA, IgD and IgE, respectively.

[0081] The phrase “specifically (or selectively) binds” to an antibody or “specifically (or selectively) immunoreactive with,” when referring to a protein or peptide, refers to a binding reaction that is determinative of the presence of the protein, often in a heterogeneous population of proteins and other biologics. Thus, under designated immunoassay conditions, the specified antibodies bind to a particular protein at least two times the background and more typically more than 10 to 100 times background. Specific binding to an antibody under such conditions requires an antibody that is selected for its specificity for a particular protein. For example, polyclonal antibodies can be selected to obtain only a subset of antibodies that are specifically immunoreactive with the selected antigen and not with other proteins. This selection may be achieved by subtracting out antibodies that cross-react with other molecules. A variety of immunoassay formats may be used to select antibodies specifically immunoreactive with a particular protein. For example, solid-phase ELISA immunoassays are routinely used to select antibodies specifically immunoreactive with a protein (see, e.g., Harlow & Lane, Using Antibodies, A Laboratory Manual (1998) for a description of immunoassay formats and conditions that can be used to determine specific immunoreactivity).

[0082] An exemplary immunoglobulin (antibody) structural unit comprises a tetramer. Each tetramer is composed of two identical pairs of polypeptide chains, each pair having one “light” (about 25 kDa) and one “heavy” chain (about 50-70 kDa). The N-terminus of each chain defines a variable region of about 100 to 110 or more amino acids primarily responsible for antigen recognition. The terms “variable heavy chain,” “VII,” or “VH” refer to the variable region of an immunoglobulin heavy chain, including an Fv, scFv, dsFv or Fab; while the terms “variable light chain,” “VL” or “VL” refer to the variable region of an immunoglobulin light chain, including of an Fv, scFv, dsFv or Fab.

[0083] Examples of antibody functional fragments include, but are not limited to, complete antibody molecules, antibody fragments, such as Fv, single chain Fv (scFv), complementarity determining regions (CDRs), VL (light chain variable region), VH (heavy chain variable region), Fab, F(ab)2′ and any combination of those or any other functional portion of an immunoglobulin peptide capable of binding to target antigen (see, e.g., FUNDAMENTAL IMMUNOLOGY (Paul ed., 4th ed. 2001). As appreciated by one of skill in the art, various antibody fragments can be obtained by a variety of methods, for example, digestion of an intact antibody with an enzyme, such as pepsin; or de novo synthesis. Antibody fragments are often synthesized de novo either chemically or by using recombinant DNA methodology. Thus, the term antibody, as used herein, includes antibody fragments either produced by the modification of whole antibodies, or those synthesized de novo using recombinant DNA methodologies (e.g., single chain Fv) or those identified using phage display libraries (see, e.g., McCafferty et al., (1990) Nature 348:552). The term “antibody” also includes bivalent or bispecific molecules, diabodies, triabodies, and tetrabodies. Bivalent and bispecific molecules are described in, e.g., Kostelny et al. (1992) J. Immunol. 148:1547, Pack and Pluckthun (1992) Biochemistry 31:1579, Hollinger et al. (1993), PNAS. USA 90:6444, Gruber et al. (1994) J Immunol. 152:5368, Zhu et al. (1997) Protein Sci. 6:781, Hu et al. (1996) Cancer Res. 56:3055, Adams et al. (1993) Cancer Res. 53:4026, and McCartney, et al. (1995) Protein Eng. 8:301.

[0084] Antibodies exist, for example, as intact immunoglobulins or as a number of well-characterized fragments produced by digestion with various peptidases. Thus, for example, pepsin digests an antibody below the disulfide linkages in the hinge region to produce F(ab)′2, a dimer of Fab which itself is a light chain joined to VH-CH1 by a disulfide bond. The F(ab)′2 may be reduced under mild conditions to break the disulfide linkage in the hinge region, thereby converting the F(ab)′2 dimer into an Fab′ monomer. The Fab′ monomer is essentially the antigen binding portion with part of the hinge region (see Fundamental Immunology (Paul ed., 3d ed. 1993). While various antibody fragments are defined in terms of the digestion of an intact antibody, one of skill will appreciate that such fragments may be synthesized de novo either chemically or by using recombinant DNA methodology. Thus, the term antibody, as used herein, also includes antibody fragments either produced by the modification of whole antibodies, or those synthesized de novo using recombinant DNA methodologies (e.g., single chain Fv) or those identified using phage display libraries (see, e.g., McCafferty et al., Nature 348:552-554 (1990)).

[0085] A single-chain variable fragment (scFv) is typically a fusion protein of the variable regions of the heavy (VH) and light chains (VL) of immunoglobulins, connected with a short linker peptide of 10 to about 25 amino acids. The linker may usually be rich in glycine for flexibility, as well as serine or threonine for solubility. The linker can either connect the N-terminus of the VH with the C-terminus of the VL, or vice versa.

[0086] The epitope of an antibody is the region of its antigen to which the antibody binds. Two antibodies bind to the same or overlapping epitope if each competitively inhibits (blocks) binding of the other to the antigen. That is, a 1×, 5×, 10×, 20× or 100× excess of one antibody inhibits binding of the other by at least 30% but preferably 50%, 75%, 90% or even 99% as measured in a competitive binding assay (see, e.g., Junghans et al., Cancer Res. 50:1495, 1990). Alternatively, two antibodies have the same epitope if essentially all amino acid mutations in the antigen that reduce or eliminate binding of one antibody reduce or eliminate binding of the other. Two antibodies have overlapping epitopes if some amino acid mutations that reduce or eliminate binding of one antibody reduce or eliminate binding of the other.

[0087] For preparation of suitable antibodies of the invention and for use according to the invention, e.g., recombinant, monoclonal, or polyclonal antibodies, many techniques known in the art can be used (see, e.g., Kohler & Milstein, Nature 256:495-497 (1975); Kozbor et al., Immunology Today 4: 72 (1983); Cole et al., pp. 77-96 in Monoclonal Antibodies and Cancer Therapy, Alan R. Liss, Inc. (1985); Coligan, Current Protocols in Immunology (1991); Harlow & Lane, Antibodies, A Laboratory Manual (1988); and Goding, Monoclonal Antibodies: Principles and Practice (2d ed. 1986)). The genes encoding the heavy and light chains of an antibody of interest can be cloned from a cell, e.g., the genes encoding a monoclonal antibody can be cloned from a hybridoma and used to produce a recombinant monoclonal antibody. Gene libraries encoding heavy and light chains of monoclonal antibodies can also be made from hybridoma or plasma cells. Random combinations of the heavy and light chain gene products generate a large pool of antibodies with different antigenic specificity (see, e.g., Kuby, Immunology (3rd ed. 1997)). Techniques for the production of single chain antibodies or recombinant antibodies (U.S. Pat. Nos. 4,946,778, 4,816,567) can be adapted to produce antibodies to polypeptides of this invention. Also, transgenic mice, or other organisms such as other mammals, may be used to express humanized or human antibodies (see, e.g., U.S. Pat. Nos. 5,545,807; 5,545,806; 5,569,825; 5,625,126; 5,633,425; 5,661,016, Marks et al., Bio/Technology 10:779-783 (1992); Lonberg et al., Nature 368:856-859 (1994); Morrison, Nature 368:812-13 (1994); Fishwild et al., Nature Biotechnology 14:845-51 (1996); Neuberger, Nature Biotechnology 14:826 (1996); and Lonberg & Huszar, Intern. Rev. Immunol. 13:65-93 (1995)). Alternatively, phage display technology can be used to identify antibodies and heteromeric Fab fragments that specifically bind to selected antigens (see, e.g., McCafferty et al., Nature 348:552-554 (1990); Marks et al., Biotechnology 10:779-783 (1992)). Antibodies can also be made bispecific, i.e., able to recognize two different antigens (see, e.g., WO 93/08829, Traunecker et al., EMBO J. 10:3655-3659 (1991); and Suresh et al., Methods in Enzymology 121:210 (1986)). Antibodies can also be heteroconjugates, e.g., two covalently joined antibodies, or immunotoxins (see, e.g., U.S. Pat. No. 4,676,980, WO 91/00360; WO 92/200373; and EP 03089).

[0088] A “chimeric antibody” is an antibody molecule in which (a) the constant region, or a portion thereof, is altered, replaced or exchanged so that the antigen binding site (variable region) is linked to a constant region of a different or altered class, effector function and/or species, or an entirely different molecule which confers new properties to the chimeric antibody, e.g., an enzyme, toxin, hormone, growth factor, drug, etc.; or (b) the variable region, or a portion thereof, is altered, replaced or exchanged with a variable region having a different or altered antigen specificity. The preferred antibodies of, and for use according to the invention include humanized and/or chimeric monoclonal antibodies.

[0089] The term “antigen” as provided herein refers to molecules capable of binding to the antibody binding domain provided herein. An “antigen binding domain” as provided herein is a region of an antibody that binds to an antigen (epitope). As described above, the antigen binding domain is generally composed of one constant and one variable domain of each of the heavy and the light chain (VL, VH, CL and CH1, respectively). The paratope or antigen-binding site is formed on the N-terminus of the antigen binding domain. The two variable domains of an antigen binding domain typically bind the epitope on an antigen.

[0090] “Percentage of sequence identity” is determined by comparing two optimally aligned sequences over a comparison window, wherein the portion of the polynucleotide or polypeptide sequence in the comparison window may comprise additions or deletions (i.e., gaps) as compared to the reference sequence (which does not comprise additions or deletions) for optimal alignment of the two sequences. The percentage is calculated by determining the number of positions at which the identical nucleic acid base or amino acid residue occurs in both sequences to yield the number of matched positions, dividing the number of matched positions by the total number of positions in the window of comparison and multiplying the result by 100 to yield the percentage of sequence identity.

[0091] The terms “identical” or percent “identity,” in the context of two or more nucleic acids or polypeptide sequences, refer to two or more sequences or subsequences that are the same or have a specified percentage of amino acid residues or nucleotides that are the same (i.e., about 60% identity, preferably 65%, 70%, 75%, 80%, 85%, 90%, 91%, 92%, 93%, 94%, 95%, 96%, 97%, 98%, 99%, or higher identity over a specified region, when compared and aligned for maximum correspondence over a comparison window or designated region) as measured using a BLAST or BLAST 2.0 sequence comparison algorithms with default parameters described below, or by manual alignment and visual inspection (see, e.g., NCBI web site http://www.ncbi.nlm.nih.gov/BLAST/ or the like). Such sequences are then said to be “substantially identical.” This definition also refers to, or may be applied to, the compliment of a test sequence. The definition also includes sequences that have deletions and/or additions, as well as those that have substitutions. As described below, the preferred algorithms can account for gaps and the like. Preferably, identity exists over a region that is at least about 25 amino acids or nucleotides in length, or more preferably over a region that is 50-100 amino acids or nucleotides in length.

[0092] For specific proteins described herein, the named protein includes any of the protein's naturally occurring forms, variants or homologs that maintain the protein transcription factor activity (e.g., within at least 50%, 80%, 90%, 95%, 96%, 97%, 98%, 99% or 100% activity compared to the native protein). In some embodiments, variants or homologs have at least 90%, 95%, 96%, 97%, 98%, 99% or 100% amino acid sequence identity across the whole sequence or a portion of the sequence (e.g. a 50, 100, 150 or 200 continuous amino acid portion) compared to a naturally occurring form. In other embodiments, the protein is the protein as identified by its NCBI sequence reference. In other embodiments, the protein is the protein as identified by its NCBI sequence reference, homolog or functional fragment thereof.

[0093] A “CTLA-4” or “CTLA-4 protein” as referred to herein includes any of the recombinant or naturally-occurring forms of cytotoxic T-lymphocyte-associated protein 4 (CTLA-4) or variants or homologs thereof that maintain CTLA-4 activity (e.g. within at least 50%, 80%, 90%, 95%, 96%, 97%, 98%, 99% or 100% activity compared to CTLA-4). In some aspects, the variants or homologs have at least 90%, 95%, 96%, 97%, 98%, 99% or 100% amino acid sequence identity across the whole sequence or a portion of the sequence (e.g. a 50, 100, 150 or 200 continuous amino acid portion) compared to a naturally occurring CTLA-4 polypeptide. In embodiments, the CTLA-4 protein is substantially identical to the protein identified by the NCBI reference number GI: 83700231, or a variant or homolog having substantial identity thereto. In embodiments, the CTLA-4 protein is substantially identical to the protein identified by the NCBI reference number GI: 49902519, or a variant or homolog having substantial identity thereto. In embodiments, the CTLA-4 protein is substantially identical to the protein identified by the NCBI reference number GI: 49904741, or a variant or homolog having substantial identity thereto. In embodiments, the CTLA-4 protein is substantially identical to the protein identified by the NCBI reference number GI: 291929, or a variant or homolog having substantial identity thereto.

[0094] The term “CTLA-4 inhibitor” as provided herein refers to a substance (e.g., compound, protein, peptide, small molecule, antibody) capable of detectably lowering expression or activity level of a cytotoxic T-lymphocyte-associated protein 4 (CTLA-4) compared to a control. The inhibited expression or activity of the cytotoxic T-lymphocyte-associated protein 4 (CTLA-4) can be 10%, 20%, 30%, 40%, 50%, 60%, 70%, 80%, 90% or less than that in a control. In certain instances, the inhibition is 1.5-fold, 2-fold, 3-fold, 4-fold, 5-fold, 10-fold, or more in comparison to a control. An “antagonist” is a compound or small molecule that inhibits an cytotoxic T-lymphocyte-associated protein 4 (CTLA-4) e.g., by binding, partially or totally blocking stimulation, decrease, prevent, or delay activation, or inactivate, desensitize, or down-regulate signal transduction, gene expression or enzymatic activity necessary for CTLA-4 activity. In embodiments, the CTLA-4 antagonist is a compound or a small molecule. In embodiments, the CTLA-4 antagonist is an antibody.

[0095] The terms “D4R gene”, “uracil DNA glycosylase gene”, or the like, as used herein refer to the any of the recombinant or naturally-occurring forms of the uracil DNA glycosylase gene or variants or homologs thereof that code for a uracil DNA glycosylase polypeptide capable of maintaining the activity of the uracil DNA glycosylase polypeptide (e.g., within at least 50%, 80%, 90%, 95%, 96%, 97%, 98%, 99% or 100% activity compared to uracil DNA glycosylase polypeptide). In some aspects, the variants or homologs have at least 90%, 95%, 96%, 97%, 98%, 99% or 100% nucleic acid sequence identity across the whole sequence or a portion of the sequence (e.g., a 50, 100, 150 or 200 continuous nucleic acid portion) compared to a naturally occurring uracil DNA glycosylase gene. In embodiments, the uracil DNA glycosylase gene is substantially identical to the nucleic acid sequence corresponding to position 102720-103376 of the nucleic acid sequence identified by Accession No. DQ439815 or a variant or homolog having substantial identity thereto. In embodiments, the uracil DNA glycosylase gene includes the nucleic acid sequence of SEQ ID NO:8. In embodiments, the uracil DNA glycosylase gene is the nucleic acid sequence of SEQ ID NO:8.

[0096] The terms “E9L gene”, “DNA polymerase gene”, or the like, as used herein refer to the any of the recombinant or naturally-occurring forms of the DNA polymerase gene or variants or homologs thereof that code for a DNA polymerase polypeptide capable of maintaining the activity of the DNA polymerase polypeptide (e.g., within at least 50%, 80%, 90%, 95%, 96%, 97%, 98%, 99% or 100% activity compared to DNA polymerase polypeptide). In some aspects, the variants or homologs have at least 90%, 95%, 96%, 97%, 98%, 99% or 100% nucleic acid sequence identity across the whole sequence or a portion of the sequence (e.g., a 50, 100, 150 or 200 continuous nucleic acid portion) compared to a naturally occurring DNA polymerase gene. In embodiments, the DNA polymerase gene is substantially identical to the nucleic acid sequence corresponding to position 56656-53636 of the nucleic acid sequence identified by Accession No. AY243312 or a variant or homolog having substantial identity thereto. In embodiments, the DNA polymerase gene includes the nucleic acid sequence of SEQ ID NO:12. In embodiments, the DNA polymerase gene is the nucleic acid sequence of SEQ ID NO:12.

[0097] The terms “human sodium and iodide symporter gene”, “hNIS gene”, “NIS gene” or the like, as used herein refer to the any of the recombinant or naturally-occurring forms of the human sodium and iodide symporter gene or variants or homologs thereof that code for a human sodium and iodide symporter polypeptide capable of maintaining the activity of the human sodium and iodide symporter polypeptide (e.g., within at least 50%, 80%, 90%, 95%, 96%, 97%, 98%, 99% or 100% activity compared to human sodium and iodide symporter polypeptide). In some aspects, the variants or homologs have at least 90%, 95%, 96%, 97%, 98%, 99% or 100% nucleic acid sequence identity across the whole sequence or a portion of the sequence (e.g., a 50, 100, 150 or 200 continuous nucleic acid portion) compared to a naturally occurring human sodium and iodide symporter gene. In embodiments, the human sodium and iodide symporter gene is substantially identical to the nucleic acid sequence identified by Accession No. NM_000453 or a variant or homolog having substantial identity thereto. In embodiments, the human sodium and iodide symporter gene includes the nucleic acid sequence of SEQ ID NO:13. In embodiments, the human sodium and iodide symporter gene is the nucleic acid sequence of SEQ ID NO:13.

[0098] The terms “Emerald gene” or “Emerald sequence” as used herein refer to the genetically engineered gene or variants thereof that code for an Emerald polypeptide capable of maintaining the activity of the Emerald polypeptide (e.g., within at least 50%, 80%, 90%, 95%, 96%, 97%, 98%, 99% or 100% activity compared to the Emerald polypeptide). In some aspects, the variants or homologs have at least 90%, 95%, 96%, 97%, 98%, 99% or 100% nucleic acid sequence identity across the whole sequence or a portion of the sequence (e.g., a 50, 100, 150 or 200 continuous nucleic acid portion) compared to the Emerald sequence. In embodiments, Emerald is substantially identical to the nucleic acid sequence corresponding to position 3215-3931 of the nucleic acid sequence identified by Accession No. KF293661 or a variant or homolog having substantial identity thereto. In embodiments, the Emerald gene includes the nucleic acid sequence of SEQ ID NO:14. In embodiments, the Emerald gene is the nucleic acid sequence of SEQ ID NO:14.

[0099] The term “EGFR protein” or “EGFR” as used herein includes any of the recombinant or naturally-occurring forms of epidermal growth factor receptor (EGFR) also known as ErbB-1 or HER1 in humans, or variants or homologs thereof that maintain EGFR activity (e.g. within at least 50%, 80%, 90%, 95%, 96%, 97%, 98%, 99% or 100% activity compared to EGFR). In some aspects, the variants or homologs have at least 90%, 95%, 96%, 97%, 98%, 99% or 100% amino acid sequence identity across the whole sequence or a portion of the sequence (e.g. a 50, 100, 150 or 200 continuous amino acid portion) compared to a naturally occurring EGFR protein. In embodiments, the EGFR protein is substantially identical to the protein identified by the UniProt reference number P00533 or a variant or homolog having substantial identity thereto.

[0100] The terms “firefly luciferase gene” or “firefly luciferase sequence”, as used herein refer to the any of the recombinant or naturally-occurring forms of the firefly luciferase gene or variants or homologs thereof that code for a firefly luciferase polypeptide capable of maintaining the activity of the firefly luciferase polypeptide (e.g., within at least 50%, 80%, 90%, 95%, 96%, 97%, 98%, 99% or 100% activity compared to firefly luciferase polypeptide). In some aspects, the variants or homologs have at least 90%, 95%, 96%, 97%, 98%, 99% or 100% nucleic acid sequence identity across the whole sequence or a portion of the sequence (e.g., a 50, 100, 150 or 200 continuous nucleic acid portion) compared to a naturally occurring firefly luciferase gene. In embodiments, the firefly luciferase gene is substantially identical to the nucleic acid sequence corresponding to position 3129-4781 of the nucleic acid sequence identified by Accession No. KF990214 or a variant or homolog having substantial identity thereto. In embodiments, the firefly luciferase gene includes the nucleic acid sequence of SEQ ID NO:15. In embodiments, the firefly luciferase gene is the nucleic acid sequence of SEQ ID NO:15.

[0101] A “firefly luciferase” or “firefly luciferase protein” as referred to herein includes any of the recombinant or naturally-occurring forms of Firefly luciferase (FFLuc) or variants or homologs thereof that maintain firefly luciferase activity (e.g. within at least 50%, 80%, 90%, 95%, 96%, 97%, 98%, 99% or 100% activity compared to firefly luciferase). In some aspects, the variants or homologs have at least 90%, 95%, 96%, 97%, 98%, 99% or 100% amino acid sequence identity across the whole sequence or a portion of the sequence (e.g. a 50, 100, 150 or 200 continuous amino acid portion) compared to a naturally occurring firefly luciferase protein. In embodiments, the firefly luciferase protein is substantially identical to the protein identified by the NCBI reference number GI: 115342896, or a variant or homolog having substantial identity thereto. In embodiments, the firefly luciferase protein is substantially identical to the protein identified by the NCBI reference number GI: 1176860391, or a variant or homolog having substantial identity thereto. In embodiments, the firefly luciferase protein is substantially identical to the protein identified by the NCBI reference number GI: 7981033, or a variant or homolog having substantial identity thereto. In embodiments, the firefly luciferase protein is substantially identical to the protein identified by the NCBI reference number GI: 115342900, or a variant or homolog having substantial identity thereto.

[0102] An “enhanced green fluorescent protein” as referred to herein includes any of the recombinant or naturally-occurring forms of Enhanced green fluorescent protein (eGFP) or variants or homologs thereof that maintain enhanced green fluorescent protein activity (e.g. within at least 50%, 80%, 90%, 95%, 96%, 97%, 98%, 99% or 100% activity compared to enhanced green fluorescent protein). In some aspects, the variants or homologs have at least 90%, 95%, 96%, 97%, 98%, 99% or 100% amino acid sequence identity across the whole sequence or a portion of the sequence (e.g. a 50, 100, 150 or 200 continuous amino acid portion) compared to a naturally occurring enhanced green fluorescent protein. In embodiments, the enhanced green fluorescent protein is substantially identical to the protein identified by the NCBI reference number GI: 13194618, or a variant or homolog having substantial identity thereto. In embodiments, the enhanced green fluorescent protein is substantially identical to the protein identified by the NCBI reference number GI: 1373316, or a variant or homolog having substantial identity thereto. In embodiments, the enhanced green fluorescent protein is substantially identical to the protein identified by the NCBI reference number GI: 1377909, or a variant or homolog having substantial identity thereto.

[0103] A “Hepatitis A virus cellular receptor 2” or “Hepatitis A virus cellular receptor 2 protein” as referred to herein includes any of the recombinant or naturally-occurring forms of Hepatitis A virus cellular receptor 2 (HAVCR2) also known as cluster of T-cell immunoglobulin and mucin-domain containing3 (TIM-3) or variants or homologs thereof that maintain TIM-3 activity (e.g. within at least 50%, 80%, 90%, 95%, 96%, 97%, 98%, 99% or 100% activity compared to TIM-3). In some aspects, the variants or homologs have at least 90%, 95%, 96%, 97%, 98%, 99% or 100% amino acid sequence identity across the whole sequence or a portion of the sequence (e.g. a 50, 100, 150 or 200 continuous amino acid portion) compared to a naturally occurring TIM-3 protein. In embodiments, the TIM-3 protein is substantially identical to the protein identified by the NCBI reference number GI: 397787781, or a variant or homolog having substantial identity thereto. In embodiments, the TIM-3 protein is substantially identical to the protein identified by the NCBI reference number GI: 18088589, or a variant or homolog having substantial identity thereto. In embodiments, the TIM-3 protein is substantially identical to the protein identified by the NCBI reference number GI: 49574534, or a variant or homolog having substantial identity thereto.

[0104] A “Lymphocyte-activation gene 3” or “Lymphocyte-activation gene 3 protein” as referred to herein includes any of the recombinant or naturally-occurring forms of Lymphocyte-activation gene 3 (LAG-3) also known as cluster of differentiation 223 (CD 223) or variants or homologs thereof that maintain LAG-3 activity (e.g. within at least 50%, 80%, 90%, 95%, 96%, 97%, 98%, 99% or 100% activity compared to LAG-3). In some aspects, the variants or homologs have at least 90%, 95%, 96%, 97%, 98%, 99% or 100% amino acid sequence identity across the whole sequence or a portion of the sequence (e.g. a 50, 100, 150 or 200 continuous amino acid portion) compared to a naturally occurring LAG-3 protein. In embodiments, the LAG-3 protein is substantially identical to the protein identified by the NCBI reference number GI: 649136313, or a variant or homolog having substantial identity thereto. In embodiments, the LAG-3 protein is substantially identical to the protein identified by the NCBI reference number GI: 30851187, or a variant or homolog having substantial identity thereto. In embodiments, the LAG-3 protein is substantially identical to the protein identified by the NCBI reference number GI: 6678654, or a variant or homolog having substantial identity thereto.

[0105] A “Indoleamine-pyrrole 2,3-dioxygenase” or “Indoleamine-pyrrole 2,3-dioxygenase protein” as referred to herein includes any of the recombinant or naturally-occurring forms of Indoleamine-pyrrole 2,3-dioxygenase (IDO) also known as INDO or variants or homologs thereof that maintain IDO activity (e.g. within at least 50%, 80%, 90%, 95%, 96%, 97%, 98%, 99% or 100% activity compared to IDO). In some aspects, the variants or homologs have at least 90%, 95%, 96%, 97%, 98%, 99% or 100% amino acid sequence identity across the whole sequence or a portion of the sequence (e.g. a 50, 100, 150 or 200 continuous amino acid portion) compared to a naturally occurring IDO protein. In embodiments, the IDO protein is substantially identical to the protein identified by the NCBI reference number GI: 4504577, or a variant or homolog having substantial identity thereto. In embodiments, the IDO protein is substantially identical to the protein identified by the NCBI reference number GI: 1464315781, or a variant or homolog having substantial identity thereto. In embodiments, the IDO protein is substantially identical to the protein identified by the NCBI reference number GI: 333384361, or a variant or homolog having substantial identity thereto.

[0106] A “GITR” or “GITR” protein as referred to herein includes any of the recombinant or naturally-occurring forms of the Tumor necrosis factor receptor superfamily member 18 (TNFRSF18) also known as activation-inducible TNFR family receptor (AITR) or glucocorticoid-induced TNFR-related protein (GITR) or variants or homologs thereof that maintain GITR protein activity (e.g. within at least 50%, 80%, 90%, 95%, 96%, 97%, 98%, 99% or 100% activity compared to GITR). In some aspects, the variants or homologs have at least 90%, 95%, 96%, 97%, 98%, 99% or 100% amino acid sequence identity across the whole sequence or a portion of the sequence (e.g. a 50, 100, 150 or 200 continuous amino acid portion) compared to a naturally occurring GITR. In embodiments, the GITR protein is substantially identical to the protein identified by the NCBI reference number GI: 158931986, or a variant or homolog having substantial identity thereto. In embodiments, the GITR protein is substantially identical to the protein identified by the NCBI reference number GI: 4759246, or a variant or homolog having substantial identity thereto. In embodiments, the GITR protein is substantially identical to the protein identified by the NCBI reference number GI: 4378800, or a variant or homolog having substantial identity thereto.

[0107] The term “F14.5L gene”, “F14.5L sequence”, “F14.5L”, or the like, as used herein refers to the any of the recombinant or naturally-occurring forms of the F14.5L gene or variants or homologs thereof that code for a F14.5L polypeptide capable of maintaining the activity of the F14.5L polypeptide (e.g., within at least 50%, 80%, 90%, 95%, 96%, 97%, 98%, 99% or 100% activity compared to F14.5L polypeptide). In some aspects, the variants or homologs have at least 90%, 95%, 96%, 97%, 98%, 99% or 100% nucleic acid sequence identity across the whole sequence or a portion of the sequence (e.g., a 50, 100, 150 or 200 continuous nucleic acid portion) compared to a naturally occurring F14.5L gene. In embodiments, the F14.5L gene is substantially identical to the nucleic acid sequence corresponding to position 44428-44279 of the nucleic acid sequence identified by Accession No. KX781953 or a variant or homolog having substantial identity thereto. In embodiments, the F14.5L gene includes the nucleic acid sequence of SEQ ID NO:6. In embodiments, the F14.5L gene is the nucleic acid sequence of SEQ ID NO:6. In embodiments, the F14.5L gene is mutated. In embodiments, the F14.5L gene is partially deleted. In embodiments, the F14.5L gene includes the nucleic acid sequence of SEQ ID NO:7. In embodiments, the F14.5L gene includes the nucleic acid sequence of SEQ ID NO:7.

[0108] The terms “mCherry gene” or “mCherry sequence” as used herein refer to the any of the recombinant or naturally-occurring forms of the gene or variants or homologs thereof that code for a mCherry polypeptide capable of maintaining the activity of the mCherry polypeptide (e.g., within at least 50%, 80%, 90%, 95%, 96%, 97%, 98%, 99% or 100% activity compared to mCherry polypeptide). In some aspects, the variants or homologs have at least 90%, 95%, 96%, 97%, 98%, 99% or 100% nucleic acid sequence identity across the whole sequence or a portion of the sequence (e.g., a 50, 100, 150 or 200 continuous nucleic acid portion) compared to a naturally occurring mCherry gene. In embodiments, the mCherry gene is substantially identical to the nucleic acid sequence corresponding to position 1073-1783 of the nucleic acid sequence identified by Accession No. KX446949 or a variant or homolog having substantial identity thereto. In embodiments, the mCherry gene includes the nucleic acid sequence of SEQ ID NO:16. In embodiments, the mCherry gene is the nucleic acid sequence of SEQ ID NO:16.

[0109] An “mCherry” or “mCherry protein” as referred to herein includes any of the recombinant or naturally-occurring forms of the mFruits family of monomeric red fluorescent proteins (RFPs) member mCherry, or variants or homologs thereof that maintain mCherry activity (e.g. within at least 50%, 80%, 90%, 95%, 96%, 97%, 98%, 99% or 100% activity compared to mCherry). In some aspects, the variants or homologs have at least 90%, 95%, 96%, 97%, 98%, 99% or 100% amino acid sequence identity across the whole sequence or a portion of the sequence (e.g. a 50, 100, 150 or 200 continuous amino acid portion) compared to a naturally occurring mCherry protein. In embodiments, the mCherry protein is substantially identical to the protein identified by the NCBI reference number GI: 1229406991, or a variant or homolog having substantial identity thereto. In embodiments, the mCherry protein is substantially identical to the protein identified by the NCBI reference number GI: 1041520567, or a variant or homolog having substantial identity thereto. In embodiments, the mCherry protein is substantially identical to the protein identified by the NCBI reference number GI: 1003312471, or a variant or homolog having substantial identity thereto.

[0110] A “OX40” or “OX40 protein” as referred to herein includes any of the recombinant or naturally-occurring forms of tumor necrosis factor receptor superfamily, member 4 (OX40) also known as cluster of differentiation 134 (CD 134) or variants or homologs thereof that maintain OX40 activity (e.g. within at least 50%, 80%, 90%, 95%, 96%, 97%, 98%, 99% or 100% activity compared to OX40). In some aspects, the variants or homologs have at least 90%, 95%, 96%, 97%, 98%, 99% or 100% amino acid sequence identity across the whole sequence or a portion of the sequence (e.g. a 50, 100, 150 or 200 continuous amino acid portion) compared to a naturally occurring OX40 protein. In embodiments, the OX40 protein is substantially identical to the protein identified by the NCBI reference number GI: 32698383, or a variant or homolog having substantial identity thereto. In embodiments, the OX40 protein is substantially identical to the protein identified by the NCBI reference number GI: 732819, or a variant or homolog having substantial identity thereto. In embodiments, the OX40 protein is substantially identical to the protein identified by the NCBI reference number GI: 8926702, or a variant or homolog having substantial identity thereto. In embodiments, the OX40 protein is substantially identical to the protein identified by the NCBI reference number GI: 913406, or a variant or homolog having substantial identity thereto.

[0111] The term “OX40 inhibitor” as provided herein refers to a substance (e.g., small molecule, peptide, protein, antibody, antibody fragment, single chain variable fragment [scFv]) capable of detectably lowering expression of or activity level of OX40 compared to a control. The inhibited expression or activity of OX40 can be 10%, 20%, 30%, 40%, 50%, 60%, 70%, 80%, 90% or less than that in a control. In certain instances, the inhibition is 1.5-fold, 2-fold, 3-fold, 4-fold, 5-fold, 10-fold, or more in comparison to a control. A OX40 inhibitor inhibits OX40 e.g., by at least in part, partially or totally blocking stimulation, decreasing, preventing, or delaying activation, or inactivating, desensitizing, or down-regulating signal transduction, activity or amount of OX40 relative to the absence of the OX40 inhibitor.

[0112] A “PD-1” or “PD-1 protein” as referred to herein includes any of the recombinant or naturally-occurring forms of Programmed cell death protein 1 (PD-1) also known as cluster of differentiation 279 (CD 279) or variants or homologs thereof that maintain PD-1 activity (e.g. within at least 50%, 80%, 90%, 95%, 96%, 97%, 98%, 99% or 100% activity compared to PD-1). In some aspects, the variants or homologs have at least 90%, 95%, 96%, 97%, 98%, 99% or 100% amino acid sequence identity across the whole sequence or a portion of the sequence (e.g. a 50, 100, 150 or 200 continuous amino acid portion) compared to a naturally occurring PD-1 protein. In embodiments, the PD-1 protein is substantially identical to the protein identified by the NCBI reference number GI: 765526769, or a variant or homolog having substantial identity thereto. In embodiments, the PD-1 protein is substantially identical to the protein identified by the NCBI reference number GI: 765526771, or a variant or homolog having substantial identity thereto. In embodiments, the PD-1 protein is substantially identical to the protein identified by the NCBI reference number GI: 765526773, or a variant or homolog having substantial identity thereto. In embodiments, the PD-1 protein is substantially identical to the protein identified by the NCBI reference number GI: 167857792, or a variant or homolog having substantial identity thereto.

[0113] A “PD-L1” or “PD-L1 protein” as referred to herein includes any of the recombinant or naturally-occurring forms of programmed death ligand 1 (PD-L1) also known as cluster of differentiation 274 (CD 274) or variants or homologs thereof that maintain PD-L1 activity (e.g. within at least 50%, 80%, 90%, 95%, 96%, 97%, 98%, 99% or 100% activity compared to PD-L1). In some aspects, the variants or homologs have at least 90%, 95%, 96%, 97%, 98%, 99% or 100% amino acid sequence identity across the whole sequence or a portion of the sequence (e.g. a 50, 100, 150 or 200 continuous amino acid portion) compared to a naturally occurring PD-L1 protein. In embodiments, the PD-L1 protein is substantially identical to the protein identified by the NCBI reference number GI: 119579167, or a variant or homolog having substantial identity thereto. In embodiments, the PD-L1 protein is substantially identical to the protein identified by the NCBI reference number GI: 109731181, or a variant or homolog having substantial identity thereto. In embodiments, the PD-L1 protein is substantially identical to the protein identified by the NCBI reference number GI: 50960360, or a variant or homolog having substantial identity thereto. In embodiments, the PD-L1 protein is substantially identical to the protein identified by the NCBI reference number GI: 46854604, or a variant or homolog having substantial identity thereto.

[0114] The term “PD-L1 inhibitor” as provided herein refers to a substance (e.g., small molecule, peptide, protein, antibody, antibody fragment, single chain variable fragment [scFv]) capable of detectably lowering expression of or activity level of PD-L1 compared to a control. The inhibited expression or activity of PD-L1 can be 10%, 20%, 30%, 40%, 50%, 60%, 70%, 80%, 90% or less than that in a control. In certain instances, the inhibition is 1.5-fold, 2-fold, 3-fold, 4-fold, 5-fold, 10-fold, or more in comparison to a control. A PD-L1 inhibitor inhibits PD-L1 e.g., by at least in part, partially or totally blocking stimulation, decreasing, preventing, or delaying activation, or inactivating, desensitizing, or down-regulating signal transduction, activity or amount of PD-L1 relative to the absence of the PD-L1 inhibitor.

[0115] A “PD-1 pathway inhibitor,” “Programmed Death 1 (PD-1) pathway inhibitor,” “PD-1 signaling pathway inhibitor,” or “Programmed Death 1 (PD-1) signaling pathway inhibitor” as provided herein refers to a substance capable of detectably lowering expression of or activity level of the PD-1 signaling pathway compared to a control. The inhibited expression or activity of the PD-1 signaling pathway can be 10%, 20%, 30%, 40%, 50%, 60%, 70%, 80%, 90% or less than that in a control. In certain instances, the inhibition is 1.5-fold, 2-fold, 3-fold, 4-fold, 5-fold, 10-fold, or more in comparison to a control. An “inhibitor” is a compound or small molecule that inhibits the PD-1 signaling pathway e.g., by binding, partially or totally blocking stimulation of the PD-1 signaling pathway, decrease, prevent, or delay activation of the PD-1 signaling pathway, or inactivate, desensitize, or down-regulate signal transduction, gene expression or enzymatic activity of the PD-1 signaling pathway. The PD-1 pathway inhibitor provided herein may be a PD-1 antagonist or a PD-L1 antagonist. In embodiments, the PD-1 pathway inhibitor is a PD-1 antagonist. Thus, in embodiments, the PD-1 pathway inhibitor inhibits PD-1 activity or expression. In embodiments, the PD-1 pathway inhibitor is a PD-L1 antagonist. Thus, in embodiments, the PD-1 pathway inhibitor inhibits PD-L1 activity or expression. In embodiments, the PD-1 pathway inhibitor is a compound or a small molecule. In embodiments, the PD-1 pathway inhibitor is an antibody.

[0116] The term “PD-L1 antagonist” as provided herein refers to a substance capable of detectably lowering expression of or activity level of PD-L1 compared to a control. The inhibited expression or activity of PD-L1 can be 10%, 20%, 30%, 40%, 50%, 60%, 70%, 80%, 90% or less than that in a control. In certain instances, the inhibition is 1.5-fold, 2-fold, 3-fold, 4-fold, 5-fold, 10-fold, or more in comparison to a control. A PD-L1 antagonist inhibits PD-L1 e.g., by at least in part, partially or totally blocking stimulation, decreasing, preventing, or delaying activation, or inactivating, desensitizing, or down-regulating signal transduction, activity or amount of PD-L1 relative to the absence of the PD-L1 antagonist.

[0117] The term “PD-1 antagonist” as provided herein refers to a substance capable of detectably lowering expression of or activity level of PD-1 compared to a control. The inhibited expression or activity of PD-1 can be 10%, 20%, 30%, 40%, 50%, 60%, 70%, 80%, 90% or less than that in a control. In certain instances, the inhibition is 1.5-fold, 2-fold, 3-fold, 4-fold, 5-fold, 10-fold, or more in comparison to a control. A PD-1 antagonist inhibits PD-1 e.g., by at least in part, partially or totally blocking stimulation, decreasing, preventing, or delaying activation, or inactivating, desensitizing, or down-regulating signal transduction, activity or amount of PD-1 relative to the absence of the PD-1 antagonist.

[0118] In embodiments, the PD-1 pathway inhibitor binds to a PD-1 receptor. Thus, the PD-1 pathway inhibitor may be a PD-1 antagonist. In some embodiments, the PD-1 pathway inhibitor is a small molecule inhibitor. In other embodiments, the PD-1 pathway inhibitor is a PD-1 antibody, for example a polyclonal or monoclonal antibody. In one preferred embodiment, the antibody is a monoclonal antibody. Non-limiting examples of suitable PD-1 pathway inhibitors include atezolizumab, nivolumab, pembrolizumab, pidilizumab, avelumab, BMS-936559, AMP-224, durvalumab, avelumab, a biosimilar of any of the foregoing, or any combination of two or more of the foregoing.

[0119] In embodiments, the PD-1 pathway inhibitor binds to PD-L1. In embodiments, the PD-1 pathway inhibitor is a PD-L1 antibody. In embodiments, the PD-L1 antibody is avelumab, atezolizumab, durvalumab, or BMS-936559. In embodiments, the PD-1 pathway inhibitor is a compound or a small molecule.

[0120] The terms “thymidine kinase gene”, “TK gene”, “TK”, “J2R gene”, or “J2R” as used herein refer to the any of the recombinant or naturally-occurring forms of the thymidine kinase gene or variants or homologs thereof that code for a thymidine kinase polypeptide capable of maintaining the activity of the thymidine kinase polypeptide (e.g., within at least 50%, 80%, 90%, 95%, 96%, 97%, 98%, 99% or 100% activity compared to thymidine kinase polypeptide). In some aspects, the variants or homologs have at least 90%, 95%, 96%, 97%, 98%, 99% or 100% nucleic acid sequence identity across the whole sequence or a portion of the sequence (e.g., a 50, 100, 150 or 200 continuous nucleic acid portion) compared to a naturally occurring thymidine kinase gene. In embodiments, the thymidine kinase gene is substantially identical to the nucleic acid sequence corresponding to position 83422-83955 of the nucleic acid sequence identified by Accession No. DQ121394 or a variant or homolog having substantial identity thereto. In embodiments, the thymidine kinase gene is mutated. In embodiments, the thymidine kinase gene is partially deleted. In embodiments, the thymidine kinase gene includes the nucleic acid sequence of SEQ ID NO:4. In embodiments, the thymidine kinase gene is the nucleic acid sequence of SEQ ID NO:4. In embodiments, the thymidine kinase gene is mutated. In embodiments, the thymidine kinase gene is partially deleted. In embodiments, the thymidine kinase gene includes the nucleic acid sequence of SEQ ID NO:5. In embodiments, the thymidine kinase gene includes the nucleic acid sequence of SEQ ID NO:5.

[0121] The term “thymidine kinase” or “thymidine kinase protein” as used herein refers to any of the recombinant or naturally-occurring forms of Thymidine kinase (TK), or variants or homologs thereof that maintain thymidine kinase activity (e.g., within at least 50%, 80%, 90%, 95%, 96%, 97%, 98%, 99% or 100% activity compared to thymidine kinase). In some aspects, the variants or homologs have at least 90%, 95%, 96%, 97%, 98%, 99% or 100% amino acid sequence identity across the whole sequence or a portion of the sequence (e.g., a 50, 100, 150 or 200 continuous amino acid portion) compared to a naturally occurring thymidine kinase protein. In embodiments, the thymidine kinase protein is substantially identical to the protein identified by the NCBI reference number GI: 339719, or a variant or homolog having substantial identity thereto. In embodiments, the thymidine kinase protein is substantially identical to the protein identified by the NCBI reference number GI: 202079, or a variant or homolog having substantial identity thereto. In embodiments, the thymidine kinase protein is substantially identical to the protein identified by the NCBI reference number GI: 25167087, or a variant or homolog having substantial identity thereto.

[0122] The term “Human Leukocyte Antigen II” or “Human Leukocyte Antigen II protein” as used herein refers to any of the recombinant or naturally-occurring forms of Human Leukocyte Antigen II (HLA II) also known as MHC class II Human Leukocyte Antigen or Human Leukocyte Antigen class II, or variants or homologs thereof that maintain Human Leukocyte Antigen II activity (e.g., within at least 50%, 80%, 90%, 95%, 96%, 97%, 98%, 99% or 100% activity compared to Human Leukocyte Antigen II). In some aspects, the variants or homologs have at least 90%, 95%, 96%, 97%, 98%, 99% or 100% amino acid sequence identity across the whole sequence or a portion of the sequence (e.g., a 50, 100, 150 or 200 continuous amino acid portion) compared to a naturally occurring Human Leukocyte Antigen II. In embodiments, the Human Leukocyte Antigen II protein is substantially identical to the protein identified by the NCBI reference number GI: 122206, or a variant or homolog having substantial identity thereto. In embodiments, the Human Leukocyte Antigen II protein is substantially identical to the protein identified by the NCBI reference number GI: 451344622, or a variant or homolog having substantial identity thereto. In embodiments, the Human Leukocyte Antigen II protein is substantially identical to the protein identified by the NCBI reference number GI: 290457643, or a variant or homolog having substantial identity thereto. In embodiments, the Human Leukocyte Antigen II protein is substantially identical to the protein identified by the NCBI reference number GI: 545422, or a variant or homolog having substantial identity thereto.

[0123] A “CD137” or “CD137 protein” as referred to herein includes any of the recombinant or naturally-occurring forms of tumor necrosis factor receptor superfamily member 9 (TNFRSF9) also known as cluster of differentiation 137 (CD 137), 4-1BB, and induced by lymphocyte activation (ILA) or variants or homologs thereof that maintain CD 137 activity (e.g. within at least 50%, 80%, 90%, 95%, 96%, 97%, 98%, 99% or 100% activity compared to CD 137). In some aspects, the variants or homologs have at least 90%, 95%, 96%, 97%, 98%, 99% or 100% amino acid sequence identity across the whole sequence or a portion of the sequence (e.g. a 50, 100, 150 or 200 continuous amino acid portion) compared to a naturally occurring CD 137 protein. In embodiments, the CD 137 protein is substantially identical to the protein identified by the NCBI reference number GI: 5730095, or a variant or homolog having substantial identity thereto. In embodiments, the CD 137 protein is substantially identical to the protein identified by the NCBI reference number GI: 119591996, or a variant or homolog having substantial identity thereto. In embodiments, the CD 137 protein is substantially identical to the protein identified by the NCBI reference number GI: 37953283, or a variant or homolog having substantial identity thereto.

[0124] The terms “H5 promoter”, “H5”, or the like, as used herein refer to the any of the recombinant or naturally-occurring forms of the H5 promoter or variants or homologs thereof that maintain the activity of the H5 promoter (e.g., within at least 50%, 80%, 90%, 95%, 96%, 97%, 98%, 99% or 100% activity compared to the H5 promoter). In some aspects, the variants or homologs have at least 90%, 95%, 96%, 97%, 98%, 99% or 100% nucleic acid sequence identity across the whole sequence or a portion of the sequence (e.g., a 50, 100, 150 or 200 continuous nucleic acid portion) compared to a naturally occurring H5 promoter. In embodiments, the H5 promoter is substantially identical to the nucleic acid sequence corresponding to position 7-76 of the nucleic acid sequence identified by Accession No. FJ386852 or a variant or homolog having substantial identity thereto. In embodiments, the H5 promoter includes the nucleic acid sequence of SEQ ID NO:18. In embodiments, the H5 promoter is the nucleic acid sequence of SEQ ID NO:18.

[0125] The terms “SE promoter”, “SE”, or the like, as used herein refer to the any of the recombinant or naturally-occurring forms of the SE promoter or variants or homologs thereof that maintain the activity of the SE promoter (e.g., within at least 50%, 80%, 90%, 95%, 96%, 97%, 98%, 99% or 100% activity compared to the SE promoter). In some aspects, the variants or homologs have at least 90%, 95%, 96%, 97%, 98%, 99% or 100% nucleic acid sequence identity across the whole sequence or a portion of the sequence (e.g., a 50, 100, 150 or 200 continuous nucleic acid portion) compared to a naturally occurring SE promoter. In embodiments, the SE promoter includes the nucleic acid sequence of SEQ ID NO:19. In embodiments, the SE promoter is the nucleic acid sequence of SEQ ID NO:19.

[0126] The terms “11K promoter”, “11K”, or the like, as used herein refer to the any of the recombinant or naturally-occurring forms of the 11K promoter or variants or homologs thereof that maintain the activity of the 11K promoter (e.g., within at least 50%, 80%, 90%, 95%, 96%, 97%, 98%, 99% or 100% activity compared to the 11K promoter). In some aspects, the variants or homologs have at least 90%, 95%, 96%, 97%, 98%, 99% or 100% nucleic acid sequence identity across the whole sequence or a portion of the sequence (e.g., a 50, 100, 150 or 200 continuous nucleic acid portion) compared to a naturally occurring 11K promoter. In embodiments, the 11K promoter is substantially identical to the nucleic acid sequence corresponding to position 40734-40771 of the nucleic acid sequence identified by Accession No. KF179385 or a variant or homolog having substantial identity thereto. In embodiments, the 11K promoter includes the nucleic acid sequence of SEQ ID NO:20. In embodiments, the 11K promoter is the nucleic acid sequence of SEQ ID NO:20.

[0127] The terms “virus” or “virus particle” are used according to its plain ordinary meaning within Virology and refers to a virion including the viral genome (e.g. DNA, RNA, single strand, double strand), viral capsid and associated proteins, and in the case of enveloped viruses (e.g. herpesvirus), an envelope including lipids and optionally components of host cell membranes, and/or viral proteins.

[0128] The term “poxvirus” is used according to its plain ordinary meaning within Virology and refers to a member of Poxviridae family capable of infecting vertebrates and invertebrates which replicate in the cytoplasm of their host. In embodiments, poxvirus virions have a size of about 200 nm in diameter and about 300 nm in length and possess a genome in a single, linear, double-stranded segment of DNA, typically 130-375 kilobase. The term poxvirus includes, without limitation, all genera of poxviridae (e.g., betaentomopoxvirus, yatapoxvirus, cervidpoxvirus, gammaentomopoxvirus, leporipoxvirus, suipoxvirus, molluscipoxvirus, crocodylidpoxvirus, alphaentomopoxvirus, capripoxvirus, orthopoxvirus, avipoxvirus, and parapoxvirus). In embodiments, the poxvirus is an orthopoxvirus (e.g., smallpox virus, vaccinia virus, cowpox virus, monkeypox virus), parapoxvirus (e.g., orf virus, pseudocowpox virus, bovine popular stomatitis virus), yatapoxvirus (e.g., tanapox virus, yaba monkey tumor virus) or molluscipoxvirus (e.g., molluscum contagiosum virus). In embodiments, the poxvirus is an orthopoxvirus (e.g., cowpox virus strain Brighton, raccoonpox virus strain Herman, rabbitpox virus strain Utrecht, vaccinia virus strain WR, vaccinia virus strain IHD, vaccinia virus strain Elstree, vaccinia virus strain CL, vaccinia virus strain Lederle-Chorioallantoic, or vaccinia virus strain AS). In embodiments, the poxvirus is a parapoxvirus (e.g., orf virus strain NZ2 or pseudocowpox virus strain TJS).

[0129] The term “chimeric” used within the context of a chimeric poxvirus, is used according to its plain ordinary meaning within Virology and refers to a hybrid microorganism (e.g., chimeric poxvirus) created by joining nucleic acid fragments from two or more different microorganisms (e.g., two viruses from the same subfamily, two viruses from different subfamilies). In embodiments, the nucleic acid fragments from at least two poxvirus strains combined contain the essential genes necessary for replication. In embodiments, the nucleic acid fragments from one of the at least two poxvirus strains contain the essential genes necessary for replication. The chimeric poxvirus provided herein including embodiments thereof may include one or more transgenes (i.e., nucleic acid sequences not native to the viral genome). For example, the chimeric poxvirus provided herein including embodiments thereof may include an anti-cancer nucleic acid sequence, a nucleic acid binding sequence, a detectable moiety-encoding nucleic acid sequence or any combination thereof. In embodiments, the chimeric poxvirus includes a nucleic acid sequence including an anti-cancer nucleic acid sequence, a nucleic acid binding sequence and a detectable moiety-encoding nucleic acid sequence. In embodiments, the chimeric poxvirus includes a nucleic acid sequence including an anti-cancer nucleic acid sequence and a detectable moiety-encoding nucleic acid sequence. In embodiments, the chimeric poxvirus includes a nucleic acid sequence including a nucleic acid binding sequence and a detectable moiety-encoding nucleic acid sequence. In embodiments, the chimeric poxvirus includes a nucleic acid sequence including an anti-cancer nucleic acid sequence and a nucleic acid binding sequence.

[0130] The term “plaque forming units” is used according to its plain ordinary meaning in Virology and refers to a unit of measurement based on the number of plaques per unit volume of a sample. In some embodiments the units are based on the number of plaques that could form when infecting a monolayer of susceptible cells. Plaque forming unit equivalents are units of measure of inactivated virus. In some embodiments, plaque forming unit equivalents are derived from plaque forming units for a sample prior to inactivation. In embodiments, plaque forming units are abbreviated “Pfu”.

[0131] The terms “multiplicity of infection” or “MOI” are used according to its plain ordinary meaning in Virology and refers to the ratio of components (e.g., poxvirus) to the target (e.g., cell) in a given area. In embodiments, the area is assumed to be homogenous.

[0132] The term “replicate” is used in accordance with its plain ordinary meaning and refers to the ability of a cell or virus to produce progeny. A person of ordinary skill in the art will immediately understand that the term replicate when used in connection with DNA, refers to the biological process of producing two identical replicas of DNA from one original DNA molecule. In the context of a virus, the term “replicate” includes the ability of a virus to replicate (duplicate the viral genome and packaging said genome into viral particles) in a host cell and subsequently release progeny viruses from the host cell, which results in the lysis of the host cell. A “replication-competent” virus as provided herein refers to a virus (chimeric poxvirus) that is capable of replicating in a cell (e.g., a cancer cell). Similarly, an “oncolytic virus” as referred to herein, is a virus that is capable of infecting and killing cancer cells. As the infected cancer cells are destroyed by oncolysis, they release new infectious virus particles or virions to help destroy the remaining tumor. In embodiments, the chimeric poxvirus is able to replicate in a cancer cell. In embodiments, the chimeric poxvirus does not detectably replicate in a healthy cell relative to a standard control. In embodiments, the chimeric poxvirus provided herein has an increased oncolytic activity compared to its parental virus. In embodiments, the oncolytic activity (ability to induce cell death in an infected cell) is more than 1.5, 2, 3, 4, 5, 6, 7, 8, 9, 10, 100, 10000, 10000 times increased compared to the oncolytic activity of a parental virus (one of the viruses used to form the chimeric virus provided herein).

[0133] The term “cowpox virus strain Brighton” is used according to its common, ordinary meaning and refers to virus strains of the same or similar names and functional fragments and homologs thereof. The term includes recombinant or naturally occurring forms of cowpox virus strain Brighton or variants thereof that maintain cowpox virus strain Brighton activity (e.g. within at least 30%, 40%, 50%, 60%, 70%, 80%, 90%, 95%, or 100%). The term includes recombinant or naturally occurring forms of cowpox virus strain Brighton or variants thereof whose genome has sequence identity to the cowpox virus strain Brighton genome (e.g. about 65%, 70%, 75%, 80%, 85%, 90%, 95%, 99% or 100% identity to the cowpox virus strain Brighton genome). Cowpox virus strain Brighton may refer to variants having mutated amino acid residues that modulate (e.g. increase or decrease when compared to cowpox virus strain Brighton) cowpox virus strain Brighton activity, expression, cellular targeting, or infectivity. Cowpox virus strain Brighton may be modified as described herein. In embodiments, the cowpox virus strain Brighton refers to the virus strain identified by ATCC (American Type Culture Collection) reference number ATCC VR-302™, variants or homologs thereof. In embodiments, the cowpox virus strain Brighton refers to the virus strain identified by Taxonomy reference number 265872, variants or homologs thereof.

[0134] The term “raccoonpox virus strain Herman” is used according to its common, ordinary meaning and refers to virus strains of the same or similar names and functional fragments and homologs thereof. The term includes recombinant or naturally occurring forms of raccoonpox virus strain Herman or variants thereof that maintain raccoonpox virus strain Herman activity (e.g. within at least 30%, 40%, 50%, 60%, 70%, 80%, 90%, 95%, or 100%). The term includes recombinant or naturally occurring forms of raccoonpox virus strain Herman or variants thereof whose genome has sequence identity to the raccoonpox virus strain Herman genome (e.g. about 65%, 70%, 75%, 80%, 85%, 90%, 95%, 99% or 100% identity to the raccoonpox virus strain Herman genome). Raccoonpox virus strain Herman may refer to variants having mutated amino acid residues that modulate (e.g. increase or decrease when compared to raccoonpox virus strain Herman) raccoonpox virus strain Herman activity, expression, cellular targeting, or infectivity. Raccoonpox virus strain Herman may be modified as described herein. In embodiments, the raccoonpox virus strain Herman refers to the virus strain identified by ATCC reference number ATCC VR-838™, variants or homologs thereof. In embodiments, the raccoonpox virus strain Herman refers to the virus strain encoded by the nucleic acid sequence with the reference number NC_027213.

[0135] The term “rabbitpox virus strain Utrecht” is used according to its common, ordinary meaning and refers to virus strains of the same or similar names and functional fragments and homologs thereof. The term includes recombinant or naturally occurring forms of rabbitpox virus strain Utrecht or variants thereof that maintain rabbitpox virus strain Utrecht activity (e.g. within at least 30%, 40%, 50%, 60%, 70%, 80%, 90%, 95%, or 100%). The term includes recombinant or naturally occurring forms of rabbitpox virus strain Utrecht or variants thereof whose genome has sequence identity to the rabbitpox virus strain Utrecht genome (e.g. about 65%, 70%, 75%, 80%, 85%, 90%, 95%, 99% or 100% identity to the rabbitpox virus strain Utrecht genome). Rabbitpox virus strain Utrecht may refer to variants having mutated amino acid residues that modulate (e.g. increase or decrease when compared to rabbitpox virus strain Utrecht) rabbitpox virus strain Utrecht activity, expression, cellular targeting, or infectivity. Rabbitpox virus strain Utrecht may be modified as described herein. In embodiments, the rabbitpox virus strain Utrecht refers to the virus strain identified by ATCC reference number ATCC VR-1591™, variants or homologs thereof. In embodiments, the rabbitpox virus strain Utrecht refers to the virus strain identified by Taxonomy reference number 45417, variants or homologs thereof.

[0136] The term “vaccinia virus strain WR” is used according to its common, ordinary meaning and refers to virus strains of the same or similar names and functional fragments and homologs thereof. The term includes recombinant or naturally occurring forms of vaccinia virus strain WR or variants thereof that maintain vaccinia virus strain WR activity (e.g. within at least 30%, 40%, 50%, 60%, 70%, 80%, 90%, 95%, or 100%). The term includes recombinant or naturally occurring forms of vaccinia virus strain WR or variants thereof whose genome has sequence identity to the vaccinia virus strain WR genome (e.g. about 65%, 70%, 75%, 80%, 85%, 90%, 95%, 99% or 100% identity to the vaccinia virus strain WR genome). Vaccinia virus strain WR may refer to variants having mutated amino acid residues that modulate (e.g. increase or decrease when compared to vaccinia virus strain WR) vaccinia virus strain WR activity, expression, cellular targeting, or infectivity. Vaccinia virus strain WR may be modified as described herein. In embodiments, the vaccinia virus strain WR refers to the virus strain identified by ATCC reference number ATCC VR-1354™, variants or homologs thereof. In embodiments, the vaccinia virus strain WR refers to the virus strain identified by Taxonomy reference number 10254, variants or homologs thereof.

[0137] The term “vaccinia virus strain IHD” is used according to its common, ordinary meaning and refers to virus strains of the same or similar names and functional fragments and homologs thereof. The term includes recombinant or naturally occurring forms of vaccinia virus strain IHD or variants thereof that maintain vaccinia virus strain IHD activity (e.g. within at least 30%, 40%, 50%, 60%, 70%, 80%, 90%, 95%, or 100%). The term includes recombinant or naturally occurring forms of vaccinia virus strain IHD or variants thereof whose genome has sequence identity to the vaccinia virus strain IHD genome (e.g. about 65%, 70%, 75%, 80%, 85%, 90%, 95%, 99% or 100% identity to the vaccinia virus strain IHD genome). Vaccinia virus strain IHD may refer to variants having mutated amino acid residues that modulate (e.g. increase or decrease when compared to vaccinia virus strain IHD) vaccinia virus strain IHD activity, expression, cellular targeting, or infectivity. Vaccinia virus strain IHD may be modified as described herein. In embodiments, the vaccinia virus strain IHD refers to the virus strain identified by ATCC reference number ATCC VR-156™, variants or homologs thereof. In embodiments, the vaccinia virus strain IHD refers to the virus strain identified by Taxonomy reference number 10251, variants or homologs thereof.

[0138] The term “vaccinia virus strain Elstree” is used according to its common, ordinary meaning and refers to virus strains of the same or similar names and functional fragments and homologs thereof. The term includes recombinant or naturally occurring forms of vaccinia virus strain Elstree or variants thereof that maintain vaccinia virus strain Elstree activity (e.g. within at least 30%, 40%, 50%, 60%, 70%, 80%, 90%, 95%, or 100%). The term includes recombinant or naturally occurring forms of vaccinia virus strain Elstree or variants thereof whose genome has sequence identity to the vaccinia virus strain Elstree genome (e.g. about 65%, 70%, 75%, 80%, 85%, 90%, 95%, 99% or 100% identity to the vaccinia virus strain Elstree genome). Vaccinia virus strain Elstree may refer to variants having mutated amino acid residues that modulate (e.g. increase or decrease when compared to vaccinia virus strain Elstre) vaccinia virus strain Elstree activity, expression, cellular targeting, or infectivity. Vaccinia virus strain Elstree may be modified as described herein. In embodiments, the vaccinia virus strain Elstree refers to the virus strain identified by ATCC reference number ATCC VR-1549™, variants or homologs thereof.

[0139] The term “vaccinia virus strain CL” is used according to its common, ordinary meaning and refers to virus strains of the same or similar names and functional fragments and homologs thereof. The term includes recombinant or naturally occurring forms of vaccinia virus strain CL or variants thereof that maintain vaccinia virus strain CL activity (e.g. within at least 30%, 40%, 50%, 60%, 70%, 80%, 90%, 95%, or 100%). The term includes recombinant or naturally occurring forms of vaccinia virus strain CL or variants thereof whose genome has sequence identity to the vaccinia virus strain CL genome (e.g. about 65%, 70%, 75%, 80%, 85%, 90%, 95%, 99% or 100% identity to the vaccinia virus strain CL genome). Vaccinia virus strain CL may refer to variants having mutated amino acid residues that modulate (e.g. increase or decrease when compared to vaccinia virus strain CL) vaccinia virus strain CL activity, expression, cellular targeting, or infectivity. Vaccinia virus strain CL may be modified as described herein. In embodiments, the vaccinia virus strain CL refers to the virus strain identified by ATCC reference number ATCC VR-1774™, variants or homologs thereof.

[0140] The term “vaccinia virus strain Lederle-Chorioallantoic” is used according to its common, ordinary meaning and refers to virus strains of the same or similar names and functional fragments and homologs thereof. The term includes recombinant or naturally occurring forms of vaccinia virus strain Lederle-Chorioallantoic or variants thereof that maintain vaccinia virus strain Lederle-Chorioallantoic activity (e.g. within at least 30%, 40%, 50%, 60%, 70%, 80%, 90%, 95%, or 100%). The term includes recombinant or naturally occurring forms of vaccinia virus strain Lederle-Chorioallantoic or variants thereof whose genome has sequence identity to the vaccinia virus strain Lederle-Chorioallantoic genome (e.g. about 65%, 70%, 75%, 80%, 85%, 90%, 95%, 99% or 100% identity to the vaccinia virus strain Lederle-Chorioallantoic genome). Vaccinia virus strain Lederle-Chorioallantoic may refer to variants having mutated amino acid residues that modulate (e.g. increase or decrease when compared to vaccinia virus strain Lederle-Chorioallantoic) vaccinia virus strain Lederle-Chorioallantoic activity, expression, cellular targeting, or infectivity. Vaccinia virus strain Lederle-Chorioallantoic may be modified as described herein. In embodiments, the vaccinia virus strain Lederle-Chorioallantoic refers to the virus strain identified by ATCC reference number ATCC VR-118™, variants or homologs thereof.

[0141] The term “vaccinia virus strain AS” is used according to its common, ordinary meaning and refers to virus strains of the same or similar names and functional fragments and homologs thereof. The term includes recombinant or naturally occurring forms of vaccinia virus strain AS or variants thereof that maintain vaccinia virus strain AS activity (e.g. within at least 30%, 40%, 50%, 60%, 70%, 80%, 90%, 95%, or 100%). The term includes recombinant or naturally occurring forms of vaccinia virus strain AS or variants thereof whose genome has sequence identity to the vaccinia virus strain AS genome (e.g. about 65%, 70%, 75%, 80%, 85%, 90%, 95%, 99% or 100% identity to the vaccinia virus strain AS genome). Vaccinia virus strain AS may refer to variants having mutated amino acid residues that modulate (e.g. increase or decrease when compared to vaccinia virus strain AS) vaccinia virus strain AS activity, expression, cellular targeting, or infectivity. Vaccinia virus strain AS may be modified as described herein. In embodiments, the vaccinia virus strain AS refers to the virus strain identified by ATCC reference number ATCC VR-2010™, variants or homologs thereof.

[0142] The term “orf virus strain NZ2” is used according to its common, ordinary meaning and refers to virus strains of the same or similar names and functional fragments and homologs thereof. The term includes recombinant or naturally occurring forms of orf virus strain NZ2 or variants thereof that maintain orf virus strain NZ2 activity (e.g. within at least 30%, 40%, 50%, 60%, 70%, 80%, 90%, 95%, or 100%). The term includes recombinant or naturally occurring forms of orf virus strain NZ2 or variants thereof whose genome has sequence identity to the orf virus strain NZ2 genome (e.g. about 65%, 70%, 75%, 80%, 85%, 90%, 95%, 99% or 100% identity to the orf virus strain NZ2 genome). Orf virus strain NZ2 may refer to variants having mutated amino acid residues that modulate (e.g. increase or decrease when compared to orf virus strain NZ2) orf virus strain NZ2 activity, expression, cellular targeting, or infectivity. Orf virus strain NZ2 may be modified as described herein. In embodiments, the orf virus strain NZ2 refers to the virus strain identified by ATCC reference number ATCC VR-1548™, variants or homologs thereof. In embodiments, the orf virus strain NZ2 refers to the virus strain identified by Taxonomy reference number 10259, variants or homologs thereof.

[0143] The term “pseudocowpox virus strain TJS” is used according to its common, ordinary meaning and refers to virus strains of the same or similar names and functional fragments and homologs thereof. The term includes recombinant or naturally occurring forms of pseudocowpox virus strain TJS or variants thereof that maintain pseudocowpox virus strain TJS activity (e.g. within at least 30%, 40%, 50%, 60%, 70%, 80%, 90%, 95%, or 100%). The term includes recombinant or naturally occurring forms of pseudocowpox virus strain TJS or variants thereof whose genome has sequence identity to the pseudocowpox virus strain TJS genome (e.g. about 65%, 70%, 75%, 80%, 85%, 90%, 95%, 99% or 100% identity to the pseudocowpox virus strain TJS genome). Pseudocowpox virus strain TJS may refer to variants having mutated amino acid residues that modulate (e.g. increase or decrease when compared to pseudocowpox virus strain TJS) pseudocowpox virus strain TJS activity, expression, cellular targeting, or infectivity. Pseudocowpox virus strain TJS may be modified as described herein. In embodiments, the pseudocowpox virus strain TJS refers to the virus strain identified by ATCC reference number ATCC VR-634™, variants or homologs thereof.

[0144] In embodiments, cowpox virus strain Brighton is cowpox virus strain Brighton ATCC VR-302™. In embodiments, raccoonpox virus strain Herman is raccoonpox virus strain Herman ATCC VR-838™. In embodiments, rabbitpox virus strain Utrecht is rabbitpox virus strain Utrecht ATCC VR-1591™. In embodiments, vaccinia virus strain WR is vaccinia virus strain WR ATCC VR-1354™. In embodiments, vaccinia virus strain IHD is vaccinia virus strain IHD ATCC VR-156™. In embodiments, vaccinia virus strain Elstree is vaccinia virus strain Elstree ATCC VR-1549™. In embodiments, vaccinia virus strain CL is vaccinia virus strain CL ATCC VR-1774™. In embodiments, vaccinia virus strain Lederle-Chorioallantoic is vaccinia virus strain Lederle-Chorioallantoic ATCC VR-118™. In embodiments, vaccinia virus strain AS is vaccinia virus strain AS ATCC VR-2010™. In embodiments, orf virus strain NZ2 is orf virus strain NZ2 ATCC VR-1548™. In embodiments, pseudocowpox virus strain TJS is pseudocowpox virus strain TJS ATCC VR-634™. In embodiments, the cowpox virus strain Brighton refers to the virus strain identified by Taxonomy reference number 265872, variants or homologs thereof.

[0145] In this disclosure, “comprises,” “comprising,” “containing” and “having” and the like can have the meaning ascribed to them in U.S. Patent law and can mean “includes,” “including,” and the like. “Consisting essentially of or “consists essentially” likewise has the meaning ascribed in U.S. patent law and the term is open-ended, allowing for the presence of more than that which is recited so long as basic or novel characteristics of that which is recited is not changed by the presence of more than that which is recited, but excludes prior art embodiments.

[0146] The term “pharmaceutically acceptable salts” is meant to include salts of the active compounds that are prepared with relatively nontoxic acids or bases, depending on the particular substituents found on the compounds described herein. When compounds of the present disclosure contain relatively acidic functionalities, base addition salts can be obtained by contacting the neutral form of such compounds with a sufficient amount of the desired base, either neat or in a suitable inert solvent. Examples of pharmaceutically acceptable base addition salts include sodium, potassium, calcium, ammonium, organic amino, or magnesium salt, or a similar salt. When compounds of the present disclosure contain relatively basic functionalities, acid addition salts can be obtained by contacting the neutral form of such compounds with a sufficient amount of the desired acid, either neat or in a suitable inert solvent. Examples of pharmaceutically acceptable acid addition salts include those derived from inorganic acids like hydrochloric, hydrobromic, nitric, carbonic, monohydrogencarbonic, phosphoric, monohydrogenphosphoric, dihydrogenphosphoric, sulfuric, monohydrogensulfuric, hydriodic, or phosphorous acids and the like, as well as the salts derived from relatively nontoxic organic acids like acetic, propionic, isobutyric, maleic, malonic, benzoic, succinic, suberic, fumaric, lactic, mandelic, phthalic, benzenesulfonic, p-tolylsulfonic, citric, tartaric, oxalic, methanesulfonic, and the like. Also included are salts of amino acids such as arginate and the like, and salts of organic acids like glucuronic or galactunoric acids and the like (see, for example, Berge et al., “Pharmaceutical Salts”, Journal of Pharmaceutical Science, 1977, 66, 1-19). Certain specific compounds of the present disclosure contain both basic and acidic functionalities that allow the compounds to be converted into either base or acid addition salts.

[0147] Thus, the compounds of the present disclosure may exist as salts, such as with pharmaceutically acceptable acids. The present disclosure includes such salts. Non-limiting examples of such salts include hydrochlorides, hydrobromides, phosphates, sulfates, methanesulfonates, nitrates, maleates, acetates, citrates, fumarates, proprionates, tartrates (e.g., (+)-tartrates, (−)-tartrates, or mixtures thereof including racemic mixtures), succinates, benzoates, and salts with amino acids such as glutamic acid, and quaternary ammonium salts (e.g. methyl iodide, ethyl iodide, and the like). These salts may be prepared by methods known to those skilled in the art.

[0148] The neutral forms of the compounds are preferably regenerated by contacting the salt with a base or acid and isolating the parent compound in the conventional manner. The parent form of the compound may differ from the various salt forms in certain physical properties, such as solubility in polar solvents.

[0149] In addition to salt forms, the present disclosure provides compounds, which are in a prodrug form. Prodrugs of the compounds described herein are those compounds that readily undergo chemical changes under physiological conditions to provide the compounds of the present disclosure. Prodrugs of the compounds described herein may be converted in vivo after administration. Additionally, prodrugs can be converted to the compounds of the present disclosure by chemical or biochemical methods in an ex vivo environment, such as, for example, when contacted with a suitable enzyme or chemical reagent.

[0150] Certain compounds of the present disclosure can exist in unsolvated forms as well as solvated forms, including hydrated forms. In general, the solvated forms are equivalent to unsolvated forms and are encompassed within the scope of the present disclosure. Certain compounds of the present disclosure may exist in multiple crystalline or amorphous forms. In general, all physical forms are equivalent for the uses contemplated by the present disclosure and are intended to be within the scope of the present disclosure.

[0151] “Pharmaceutically acceptable excipient” and “pharmaceutically acceptable carrier” refer to a substance that aids the administration of an active agent to and absorption by a subject and can be included in the compositions of the present disclosure without causing a significant adverse toxicological effect on the patient. Non-limiting examples of pharmaceutically acceptable excipients include water, NaCl, normal saline solutions, lactated Ringer's, normal sucrose, normal glucose, binders, fillers, disintegrants, lubricants, coatings, sweeteners, flavors, salt solutions (such as Ringer's solution), alcohols, oils, gelatins, carbohydrates such as lactose, amylose or starch, fatty acid esters, hydroxymethycellulose, polyvinyl pyrrolidine, and colors, and the like. Such preparations can be sterilized and, if desired, mixed with auxiliary agents such as lubricants, preservatives, stabilizers, wetting agents, emulsifiers, salts for influencing osmotic pressure, buffers, coloring, and/or aromatic substances and the like that do not deleteriously react with the compounds of the disclosure. One of skill in the art will recognize that other pharmaceutical excipients are useful in the present disclosure.

[0152] The term “preparation” is intended to include the formulation of the active compound with encapsulating material as a carrier providing a capsule in which the active component with or without other carriers, is surrounded by a carrier, which is thus in association with it. Similarly, cachets and lozenges are included. Tablets, powders, capsules, pills, cachets, and lozenges can be used as solid dosage forms suitable for oral administration.

[0153] As used herein, the term “about” means a range of values including the specified value, which a person of ordinary skill in the art would consider reasonably similar to the specified value. In embodiments, about means within a standard deviation using measurements generally acceptable in the art. In embodiments, about means a range extending to +/−10% of the specified value. In embodiments, about includes the specified value.

[0154] A “synergistic amount” as used herein refers to the sum of a first amount (e.g., an amount of a compound provided herein) and a second amount (e.g., a therapeutic agent) that results in a synergistic effect (i.e. an effect greater than an additive effect). Therefore, the terms “synergy”, “synergism”, “synergistic”, “combined synergistic amount”, and “synergistic therapeutic effect” which are used herein interchangeably, refer to a measured effect of the compound administered in combination where the measured effect is greater than the sum of the individual effects of each of the compounds provided herein administered alone as a single agent.

[0155] In embodiments, a synergistic amount may be about 0.1, 0.2, 0.3, 0.4, 0.5, 0.6, 0.7, 0.8, 0.9, 1.0, 1.1, 1.2, 1.3, 1.4, 1.5, 1.6, 1.7, 1.8, 1.9, 2.0, 2.1, 2.2, 2.3, 2.4, 2.5, 2.6, 2.7, 2.8, 2.9, 3.0, 3.1, 3.2, 3.3, 3.4, 3.5, 3.6, 3.7, 3.8, 3.9, 4.0, 4.1, 4.2, 4.3, 4.4, 4.5, 4.6, 4.7, 4.8, 4.9, 5.0, 5.1, 5.2, 5.3, 5.4, 5.5, 5.6, 5.7, 5.8, 5.9, 6.0, 6.1, 6.2, 6.3, 6.4, 6.5, 6.6, 6.7, 6.8, 6.9, 7.0, 7.1, 7.2, 7.3, 7.4, 7.5, 7.6, 7.7, 7.8, 7.9, 8.0, 8.1, 8.2, 8.3, 8.4, 8.5, 8.6, 8.7, 8.8, 8.9, 9.0, 9.1, 9.2, 9.3, 9.4, 9.5, 9.6, 9.7, 9.8, 9.9, 10.0, 11, 12, 13, 14, 15, 16, 17, 18, 19, 20, 21, 22, 23, 24, 25, 26, 27, 28, 29, 30, 31, 32, 33, 34, 35, 36, 37, 38, 39, 40, 41, 42, 43, 44, 45, 46, 47, 48, 49, 50, 51, 52, 53, 54, 55, 56, 57, 58, 59, 60, 61, 62, 63, 64, 65, 66, 67, 68, 69, 70, 71, 72, 73, 74, 75, 76, 77, 78, 79, 80, 81, 82, 83, 84, 85, 86, 87, 88, 89, 90, 91, 92, 93, 94, 95, 96, 97, 98, or 99% of the amount of the compound provided herein when used separately from the therapeutic agent. In embodiments, a synergistic amount may be about 0.1, 0.2, 0.3, 0.4, 0.5, 0.6, 0.7, 0.8, 0.9, 1.0, 1.1, 1.2, 1.3, 1.4, 1.5, 1.6, 1.7, 1.8, 1.9, 2.0, 2.1, 2.2, 2.3, 2.4, 2.5, 2.6, 2.7, 2.8, 2.9, 3.0, 3.1, 3.2, 3.3, 3.4, 3.5, 3.6, 3.7, 3.8, 3.9, 4.0, 4.1, 4.2, 4.3, 4.4, 4.5, 4.6, 4.7, 4.8, 4.9, 5.0, 5.1, 5.2, 5.3, 5.4, 5.5, 5.6, 5.7, 5.8, 5.9, 6.0, 6.1, 6.2, 6.3, 6.4, 6.5, 6.6, 6.7, 6.8, 6.9, 7.0, 7.1, 7.2, 7.3, 7.4, 7.5, 7.6, 7.7, 7.8, 7.9, 8.0, 8.1, 8.2, 8.3, 8.4, 8.5, 8.6, 8.7, 8.8, 8.9, 9.0, 9.1, 9.2, 9.3, 9.4, 9.5, 9.6, 9.7, 9.8, 9.9, 10.0, 11, 12, 13, 14, 15, 16, 17, 18, 19, 20, 21, 22, 23, 24, 25, 26, 27, 28, 29, 30, 31, 32, 33, 34, 35, 36, 37, 38, 39, 40, 41, 42, 43, 44, 45, 46, 47, 48, 49, 50, 51, 52, 53, 54, 55, 56, 57, 58, 59, 60, 61, 62, 63, 64, 65, 66, 67, 68, 69, 70, 71, 72, 73, 74, 75, 76, 77, 78, 79, 80, 81, 82, 83, 84, 85, 86, 87, 88, 89, 90, 91, 92, 93, 94, 95, 96, 97, 98, or 99% of the amount of the therapeutic agent when used separately from the compound provided herein.

[0156] The term “EC50” or “half maximal effective concentration” as used herein refers to the concentration of a molecule (e.g., antibody, chimeric antigen receptor or bispecific antibody) capable of inducing a response which is halfway between the baseline response and the maximum response after a specified exposure time. In embodiments, the EC50 is the concentration of a molecule (e.g., antibody, chimeric antigen receptor or bispecific antibody) that produces 50% of the maximal possible effect of that molecule.

[0157] A “therapeutic agent” as used herein refers to an agent (e.g., compound or composition described herein) that when administered to a subject will have the intended prophylactic effect, e.g., preventing or delaying the onset (or reoccurrence) of an injury, disease, pathology or condition, or reducing the likelihood of the onset (or reoccurrence) of an injury, disease, pathology, or condition, or their symptoms or the intended therapeutic effect, e.g., treatment or amelioration of an injury, disease, pathology or condition, or their symptoms including any objective or subjective parameter of treatment such as abatement; remission; diminishing of symptoms or making the injury, pathology or condition more tolerable to the patient; slowing in the rate of degeneration or decline; making the final point of degeneration less debilitating; or improving a patient's physical or mental well-being.

[0158] “Contacting” is used in accordance with its plain ordinary meaning and refers to the process of allowing at least two distinct species (e.g. chemical compounds including biomolecules or cells) to become sufficiently proximal to react, interact or physically touch. It should be appreciated; however, the resulting reaction product can be produced directly from a reaction between the added reagents or from an intermediate from one or more of the added reagents that can be produced in the reaction mixture.

[0159] The term “contacting” may include allowing two species to react, interact, or physically touch, wherein the two species may be a compound as described herein and a protein or enzyme. In some embodiments contacting includes allowing a compound described herein to interact with a protein or enzyme that is involved in a signaling pathway.

[0160] A “effective amount” is an amount sufficient for a compound (e.g., a neural stem cell including a chimeric poxvirus) to accomplish a stated purpose relative to the absence of the compound (e.g. achieve the effect for which it is administered, treat a disease, reduce enzyme activity, increase enzyme activity, reduce a signaling pathway, or reduce one or more symptoms of a disease or condition). An example of an “effective amount” is an amount sufficient to contribute to the treatment, prevention, or reduction of a symptom or symptoms of a disease, which could also be referred to as a “therapeutically effective amount.” A “reduction” of a symptom or symptoms (and grammatical equivalents of this phrase) means decreasing of the severity or frequency of the symptom(s), or elimination of the symptom(s). A “prophylactically effective amount” of a drug is an amount of a drug that, when administered to a subject, will have the intended prophylactic effect, e.g., preventing or delaying the onset (or reoccurrence) of an injury, disease, pathology or condition, or reducing the likelihood of the onset (or reoccurrence) of an injury, disease, pathology, or condition, or their symptoms. The full prophylactic effect does not necessarily occur by administration of one dose, and may occur only after administration of a series of doses. Thus, a prophylactically effective amount may be administered in one or more administrations. An “activity decreasing amount,” as used herein, refers to an amount of antagonist required to decrease the activity of an enzyme relative to the absence of the antagonist. A “function disrupting amount,” as used herein, refers to the amount of antagonist required to disrupt the function of an enzyme or protein relative to the absence of the antagonist. The exact amounts will depend on the purpose of the treatment, and will be ascertainable by one skilled in the art using known techniques (see, e.g., Lieberman, Pharmaceutical Dosage Forms (vols. 1-3, 1992); Lloyd, The Art, Science and Technology of Pharmaceutical Compounding (1999); Pickar, Dosage Calculations (1999); and Remington: The Science and Practice of Pharmacy, 20th Edition, 2003, Gennaro, Ed., Lippincott, Williams & Wilkins).

[0161] For any compound (e.g., a neural stem cell including a chimeric poxvirus) described herein, the therapeutically effective amount can be initially determined from cell culture assays. Target concentrations will be those concentrations of active compound(s) that are capable of achieving the methods described herein, as measured using the methods described herein or known in the art.

[0162] As is well known in the art, therapeutically effective amounts for use in humans can also be determined from animal models. For example, a dose for humans can be formulated to achieve a concentration that has been found to be effective in animals. The dosage in humans can be adjusted by monitoring compounds effectiveness and adjusting the dosage upwards or downwards, as described above. Adjusting the dose to achieve maximal efficacy in humans based on the methods described above and other methods is well within the capabilities of the ordinarily skilled artisan.

[0163] The term “therapeutically effective amount,” as used herein, refers to that amount of the therapeutic agent (e.g., a neural stem cell including a chimeric poxvirus) sufficient to ameliorate the disorder, as described above. For example, for the given parameter, a therapeutically effective amount will show an increase or decrease of at least 5%, 10%, 15%, 20%, 25%, 40%, 50%, 60%, 75%, 80%, 90%, or at least 100%. Therapeutic efficacy can also be expressed as “-fold” increase or decrease. For example, a therapeutically effective amount can have at least a 1.2-fold, 1.5-fold, 2-fold, 5-fold, or more effect over a control.

[0164] Dosages may be varied depending upon the requirements of the patient and the compound (e.g., a neural stem cell including a chimeric poxvirus) being employed. The dose administered to a patient, in the context of the present disclosure, should be sufficient to effect a beneficial therapeutic response in the patient over time. The size of the dose also will be determined by the existence, nature, and extent of any adverse side-effects. Determination of the proper dosage for a particular situation is within the skill of the practitioner. Generally, treatment is initiated with smaller dosages which are less than the optimum dose of the compound. Thereafter, the dosage is increased by small increments until the optimum effect under circumstances is reached. Dosage amounts and intervals can be adjusted individually to provide levels of the administered compound effective for the particular clinical indication being treated. This will provide a therapeutic regimen that is commensurate with the severity of the individual's disease state.

[0165] As used herein, the term “administering” means oral administration, administration as a suppository, topical contact, intravenous, parenteral, intraperitoneal, intramuscular, intralesional, intrathecal, intranasal or subcutaneous administration, or the implantation of a slow-release device, e.g., a mini-osmotic pump, to a subject. Administration is by any route, including parenteral and transmucosal (e.g., buccal, sublingual, palatal, gingival, nasal, vaginal, rectal, or transdermal). Parenteral administration includes, e.g., intravenous, intramuscular, intra-arteriole, intradermal, subcutaneous, intraperitoneal, intraventricular, and intracranial. Other modes of delivery include, but are not limited to, the use of liposomal formulations, intravenous infusion, transdermal patches, etc. In embodiments, the administering does not include administration of any active agent other than the recited active agent.

[0166] “Co-administer” it is meant that a composition described herein is administered at the same time, just prior to, or just after the administration of one or more additional therapies. The compounds provided herein can be administered alone or can be coadministered to the patient. Coadministration is meant to include simultaneous or sequential administration of the compounds individually or in combination (more than one compound). Thus, the preparations can also be combined, when desired, with other active substances (e.g. to reduce metabolic degradation). The compositions of the present disclosure can be delivered transdermally, by a topical route, or formulated as applicator sticks, solutions, suspensions, emulsions, gels, creams, ointments, pastes, jellies, paints, powders, and aerosols.

[0167] Certain compounds (e.g., a neural stem cell including a chimeric poxvirus) of the present disclosure can exist in unsolvated forms as well as solvated forms, including hydrated forms. In general, the solvated forms are equivalent to unsolvated forms and are encompassed within the scope of the present disclosure. Certain compounds of the present disclosure may exist in multiple crystalline or amorphous forms. In general, all physical forms are equivalent for the uses contemplated by the present disclosure and are intended to be within the scope of the present disclosure.

[0168] A “cell” as used herein, refers to a cell carrying out metabolic or other function sufficient to preserve or replicate its genomic DNA. A cell can be identified by well-known methods in the art including, for example, presence of an intact membrane, staining by a particular dye, ability to produce progeny or, in the case of a gamete, ability to combine with a second gamete to produce a viable offspring. Cells may include prokaryotic and eukaroytic cells. Prokaryotic cells include but are not limited to bacteria. Eukaryotic cells include but are not limited to yeast cells and cells derived from plants and animals, for example mammalian, insect (e.g., spodoptera) and human cells. Cells may be useful when they are naturally nonadherent or have been treated not to adhere to surfaces, for example by trypsinization.

[0169] A “stem cell” is a cell characterized by the ability of self-renewal through mitotic cell division and the potential to differentiate into a tissue or an organ. Among mammalian stem cells, embryonic stem cells (ES cells) and somatic stem cells (e.g., HSC) can be distinguished. Embryonic stem cells reside in the blastocyst and give rise to embryonic tissues, whereas somatic stem cells reside in adult tissues for the purpose of tissue regeneration and repair. A “neural stem cell” as provided herein refers to a stem cell capable to self-renew through mitotic cell division and to differentiate into a neural cell (e.g., glia cell, neuron, astrocyte, oligodendrocyte).

[0170] The term “culture” or “cell culture” means the maintenance of cells, for example cancer cells, in an artificial, in vitro environment. A “cell culture system” is used herein to refer to culture conditions in which a population of cells may be grown as monolayers or in suspension. “Culture medium” is used herein to refer to a nutrient solution for the culturing, growth, or proliferation of cells.

[0171] “Control” or “control experiment” is used in accordance with its plain ordinary meaning and refers to an experiment in which the subjects or reagents of the experiment are treated as in a parallel experiment except for omission of a procedure, reagent, or variable of the experiment. In some instances, the control is used as a standard of comparison in evaluating experimental effects. In some embodiments, a control is the measurement of the activity of a protein in the absence of a compound as described herein (including embodiments and examples). One of skill in the art will understand which standard controls are most appropriate in a given situation and be able to analyze data based on comparisons to standard control values. Standard controls are also valuable for determining the significance (e.g. statistical significance) of data. For example, if values for a given parameter are widely variant in standard controls, variation in test samples will not be considered as significant.

[0172] The terms “disease” or “condition” refer to a state of being or health status of a patient or subject capable of being treated with the compounds or methods provided herein. The disease may be a cancer. In some further instances, “cancer” refers to human cancers and carcinomas, sarcomas, adenocarcinomas, lymphomas, leukemias, including solid and lymphoid cancers, kidney, breast, lung, bladder, colon, ovarian, prostate, pancreas, stomach, brain, head and neck, skin, uterine, testicular, glioma, esophagus, and liver cancer, including hepatocarcinoma, lymphoma, including B-acute lymphoblastic lymphoma, non-Hodgkin's lymphomas (e.g., Burkitt's, Small Cell, and Large Cell lymphomas), Hodgkin's lymphoma, leukemia (including AML, ALL, and CML), or multiple myeloma.

[0173] As used herein, the term “cancer” refers to all types of cancer, neoplasm or malignant tumors found in mammals (e.g. humans), including leukemia, carcinomas and sarcomas. Exemplary cancers that may be treated with a compound or method provided herein include breast cancer, colon cancer, kidney cancer, leukemia, lung cancer, melanoma, ovarian cancer, prostate cancer, pancreatic cancer, brain cancer, liver cancer, gastric cancer or a sarcoma.

[0174] The term “leukemia” refers broadly to progressive, malignant diseases of the blood-forming organs and is generally characterized by a distorted proliferation and development of leukocytes and their precursors in the blood and bone marrow. Leukemia is generally clinically classified on the basis of (1) the duration and character of the disease-acute or chronic; (2) the type of cell involved; myeloid (myelogenous), lymphoid (lymphogenous), or monocytic; and (3) the increase or non-increase in the number abnormal cells in the blood-leukemic or aleukemic (subleukemic). Exemplary leukemias that may be treated with a compound or method provided herein include, for example, acute nonlymphocytic leukemia, chronic lymphocytic leukemia, acute granulocytic leukemia, chronic granulocytic leukemia, acute promyelocytic leukemia, adult T-cell leukemia, aleukemic leukemia, a leukocythemic leukemia, basophylic leukemia, blast cell leukemia, bovine leukemia, chronic myelocytic leukemia, leukemia cutis, embryonal leukemia, eosinophilic leukemia, Gross' leukemia, hairy-cell leukemia, hemoblastic leukemia, hemocytoblastic leukemia, histiocytic leukemia, stem cell leukemia, acute monocytic leukemia, leukopenic leukemia, lymphatic leukemia, lymphoblastic leukemia, lymphocytic leukemia, lymphogenous leukemia, lymphoid leukemia, lymphosarcoma cell leukemia, mast cell leukemia, megakaryocytic leukemia, micromyeloblastic leukemia, monocytic leukemia, myeloblastic leukemia, myelocytic leukemia, myeloid granulocytic leukemia, myelomonocytic leukemia, Naegeli leukemia, plasma cell leukemia, multiple myeloma, plasmacytic leukemia, promyelocytic leukemia, Rieder cell leukemia, Schilling's leukemia, stem cell leukemia, subleukemic leukemia, or undifferentiated cell leukemia.

[0175] The term “sarcoma” generally refers to a tumor which is made up of a substance like the embryonic connective tissue and is generally composed of closely packed cells embedded in a fibrillar or homogeneous substance. Sarcomas that may be treated with a compound or method provided herein include a chondrosarcoma, fibrosarcoma, lymphosarcoma, melanosarcoma, myxosarcoma, osteosarcoma, Abemethy's sarcoma, adipose sarcoma, liposarcoma, alveolar soft part sarcoma, ameloblastic sarcoma, botryoid sarcoma, chloroma sarcoma, chorio carcinoma, embryonal sarcoma, Wilms' tumor sarcoma, endometrial sarcoma, stromal sarcoma, Ewing's sarcoma, fascial sarcoma, fibroblastic sarcoma, giant cell sarcoma, granulocytic sarcoma, Hodgkin's sarcoma, idiopathic multiple pigmented hemorrhagic sarcoma, immunoblastic sarcoma of B cells, lymphoma, immunoblastic sarcoma of T-cells, Jensen's sarcoma, Kaposi's sarcoma, Kupffer cell sarcoma, angiosarcoma, leukosarcoma, malignant mesenchymoma sarcoma, parosteal sarcoma, reticulocytic sarcoma, Rous sarcoma, serocystic sarcoma, synovial sarcoma, or telangiectaltic sarcoma.

[0176] The term “melanoma” is taken to mean a tumor arising from the melanocytic system of the skin and other organs. Melanomas that may be treated with a compound or method provided herein include, for example, acral-lentiginous melanoma, amelanotic melanoma, benign juvenile melanoma, Cloudman's melanoma, S91 melanoma, Harding-Passey melanoma, juvenile melanoma, lentigo maligna melanoma, malignant melanoma, nodular melanoma, subungal melanoma, or superficial spreading melanoma.

[0177] The term “carcinoma” refers to a malignant new growth made up of epithelial cells tending to infiltrate the surrounding tissues and give rise to metastases. Exemplary carcinomas that may be treated with a compound or method provided herein include, for example, medullary thyroid carcinoma, familial medullary thyroid carcinoma, acinar carcinoma, acinous carcinoma, adenocystic carcinoma, adenoid cystic carcinoma, carcinoma adenomatosum, carcinoma of adrenal cortex, alveolar carcinoma, alveolar cell carcinoma, basal cell carcinoma, carcinoma basocellulare, basaloid carcinoma, basosquamous cell carcinoma, bronchioalveolar carcinoma, bronchiolar carcinoma, bronchogenic carcinoma, cerebriform carcinoma, cholangiocellular carcinoma, chorionic carcinoma, colloid carcinoma, comedo carcinoma, corpus carcinoma, cribriform carcinoma, carcinoma en cuirasse, carcinoma cutaneum, cylindrical carcinoma, cylindrical cell carcinoma, duct carcinoma, carcinoma durum, embryonal carcinoma, encephaloid carcinoma, epiermoid carcinoma, carcinoma epitheliale adenoides, exophytic carcinoma, carcinoma ex ulcere, carcinoma fibrosum, gelatiniforni carcinoma, gelatinous carcinoma, giant cell carcinoma, carcinoma gigantocellulare, glandular carcinoma, granulosa cell carcinoma, hair-matrix carcinoma, hematoid carcinoma, hepatocellular carcinoma, Hurthle cell carcinoma, hyaline carcinoma, hypernephroid carcinoma, infantile embryonal carcinoma, carcinoma in situ, intraepidermal carcinoma, intraepithelial carcinoma, Krompecher's carcinoma, Kulchitzky-cell carcinoma, large-cell carcinoma, lenticular carcinoma, carcinoma lenticulare, lipomatous carcinoma, lymphoepithelial carcinoma, carcinoma medullare, medullary carcinoma, melanotic carcinoma, carcinoma molle, mucinous carcinoma, carcinoma muciparum, carcinoma mucocellulare, mucoepidermoid carcinoma, carcinoma mucosum, mucous carcinoma, carcinoma myxomatodes, nasopharyngeal carcinoma, oat cell carcinoma, carcinoma ossificans, osteoid carcinoma, papillary carcinoma, periportal carcinoma, preinvasive carcinoma, prickle cell carcinoma, pultaceous carcinoma, renal cell carcinoma of kidney, reserve cell carcinoma, carcinoma sarcomatodes, schneiderian carcinoma, scirrhous carcinoma, carcinoma scroti, signet-ring cell carcinoma, carcinoma simplex, small-cell carcinoma, solanoid carcinoma, spheroidal cell carcinoma, spindle cell carcinoma, carcinoma spongiosum, squamous carcinoma, squamous cell carcinoma, string carcinoma, carcinoma telangiectaticum, carcinoma telangiectodes, transitional cell carcinoma, carcinoma tuberosum, tuberous carcinoma, verrucous carcinoma, or carcinoma villosum.

[0178] As used herein, the terms “metastasis,” “metastatic,” and “metastatic cancer” can be used interchangeably and refer to the spread of a proliferative disease or disorder, e.g., cancer, from one organ or another non-adjacent organ or body part. “Metastatic cancer” is also called “Stage IV cancer.” Cancer occurs at an originating site, e.g., breast, which site is referred to as a primary tumor, e.g., primary breast cancer. Some cancer cells in the primary tumor or originating site acquire the ability to penetrate and infiltrate surrounding normal tissue in the local area and/or the ability to penetrate the walls of the lymphatic system or vascular system circulating through the system to other sites and tissues in the body. A second clinically detectable tumor formed from cancer cells of a primary tumor is referred to as a metastatic or secondary tumor. When cancer cells metastasize, the metastatic tumor and its cells are presumed to be similar to those of the original tumor. Thus, if lung cancer metastasizes to the breast, the secondary tumor at the site of the breast consists of abnormal lung cells and not abnormal breast cells. The secondary tumor in the breast is referred to a metastatic lung cancer. Thus, the phrase metastatic cancer refers to a disease in which a subject has or had a primary tumor and has one or more secondary tumors. The phrases non-metastatic cancer or subjects with cancer that is not metastatic refers to diseases in which subjects have a primary tumor but not one or more secondary tumors. For example, metastatic lung cancer refers to a disease in a subject with or with a history of a primary lung tumor and with one or more secondary tumors at a second location or multiple locations, e.g., in the breast.

[0179] The terms “cutaneous metastasis” or “skin metastasis” refer to secondary malignant cell growths in the skin, wherein the malignant cells originate from a primary cancer site (e.g., breast). In cutaneous metastasis, cancerous cells from a primary cancer site may migrate to the skin where they divide and cause lesions. Cutaneous metastasis may result from the migration of cancer cells from breast cancer tumors to the skin.

[0180] The term “visceral metastasis” refer to secondary malignant cell growths in the interal organs (e.g., heart, lungs, liver, pancreas, intestines) or body cavities (e.g., pleura, peritoneum), wherein the malignant cells originate from a primary cancer site (e.g., head and neck, liver, breast). In visceral metastasis, cancerous cells from a primary cancer site may migrate to the internal organs where they divide and cause lesions. Visceral metastasis may result from the migration of cancer cells from liver cancer tumors or head and neck tumors to internal organs.

[0181] “Anti-cancer agent” is used in accordance with its plain ordinary meaning and refers to a composition (e.g. compound, drug, antagonist, inhibitor, modulator) having antineoplastic properties or the ability to inhibit the growth or proliferation of cells. Examplary anti-cancer agents include antibodies, small molecules, large molecules, and combinations thereof. In embodiments, an anti-cancer agent is a chemotherapeutic. In some embodiments, an anti-cancer agent is an agent identified herein having utility in methods of treating cancer. In some embodiments, an anti-cancer agent is an agent approved by the FDA or similar regulatory agency of a country other than the USA, for treating cancer. Examples of anti-cancer agents include, but are not limited to, MEK (e.g. MEK1, MEK2, or MEK1 and MEK2) inhibitors (e.g. XL518, CI-1040, PD035901, selumetinib/AZD6244, GSK1120212/trametinib, GDC-0973, ARRY-162, ARRY-300, AZD8330, PD0325901, U0126, PD98059, TAK-733, PD318088, AS703026, BAY 869766), alkylating agents (e.g., cyclophosphamide, ifosfamide, chlorambucil, busulfan, melphalan, mechlorethamine, uramustine, thiotepa, nitrosoureas, nitrogen mustards (e.g., mechloroethamine, cyclophosphamide, chlorambucil, meiphalan), ethylenimine and methylmelamines (e.g., hexamethlymelamine, thiotepa), alkyl sulfonates (e.g., busulfan), nitrosoureas (e.g., carmustine, lomusitne, semustine, streptozocin), triazenes (decarbazine)), anti-metabolites (e.g., 5-azathioprine, leucovorin, capecitabine, fludarabine, gemcitabine, pemetrexed, raltitrexed, folic acid analog (e.g., methotrexate), or pyrimidine analogs (e.g., fluorouracil, floxouridine, Cytarabine), purine analogs (e.g., mercaptopurine, thioguanine, pentostatin), etc.), plant alkaloids (e.g., vincristine, vinblastine, vinorelbine, vindesine, podophyllotoxin, paclitaxel, docetaxel, etc.), topoisomerase inhibitors (e.g., irinotecan, topotecan, amsacrine, etoposide (VP16), etoposide phosphate, teniposide, etc.), antitumor antibiotics (e.g., doxorubicin, adriamycin, daunorubicin, epirubicin, actinomycin, bleomycin, mitomycin, mitoxantrone, plicamycin, etc.), platinum-based compounds or platinum containing agents (e.g. cisplatin, oxaloplatin, carboplatin), anthracenedione (e.g., mitoxantrone), substituted urea (e.g., hydroxyurea), methyl hydrazine derivative (e.g., procarbazine), adrenocortical suppressant (e.g., mitotane, aminoglutethimide), epipodophyllotoxins (e.g., etoposide), antibiotics (e.g., daunorubicin, doxorubicin, bleomycin), enzymes (e.g., L-asparaginase), inhibitors of mitogen-activated protein kinase signaling (e.g. U0126, PD98059, PD184352, PD0325901, ARRY-142886, SB239063, SP600125, BAY 43-9006, wortmannin, or LY294002, Syk inhibitors, mTOR inhibitors, antibodies (e.g., rituxan), gossyphol, genasense, polyphenol E, Chlorofusin, all trans-retinoic acid (ATRA), bryostatin, tumor necrosis factor-related apoptosis-inducing ligand (TRAIL), 5-aza-2′-deoxycytidine, all trans retinoic acid, doxorubicin, vincristine, etoposide, gemcitabine, imatinib (Gleevec®), geldanamycin, 17-N-Allylamino-17-Demethoxygeldanamycin (17-AAG), flavopiridol, LY294002, bortezomib, trastuzumab, BAY 11-7082, PKC412, PD184352, 20-epi-1, 25 dihydroxyvitamin D3; 5-ethynyluracil; abiraterone; aclarubicin; acylfulvene; adecypenol; adozelesin; aldesleukin; ALL-TK antagonists; altretamine; ambamustine; amidox; amifostine; aminolevulinic acid; amrubicin; amsacrine; anagrelide; anastrozole; andrographolide; angiogenesis inhibitors; antagonist D; antagonist G; antarelix; anti-dorsalizing morphogenetic protein-1; antiandrogen, prostatic carcinoma; antiestrogen; antineoplaston; antisense oligonucleotides; aphidicolin glycinate; apoptosis gene modulators; apoptosis regulators; apurinic acid; ara-CDP-DL-PTBA; arginine deaminase; asulacrine; atamestane; atrimustine; axinastatin 1; axinastatin 2; axinastatin 3; azasetron; azatoxin; azatyrosine; baccatin III derivatives; balanol; batimastat; BCR/ABL antagonists; benzochlorins; benzoylstaurosporine; beta lactam derivatives; beta-alethine; betaclamycin B; betulinic acid; bFGF inhibitor; bicalutamide; bisantrene; bisaziridinylspermine; bisnafide; bistratene A; bizelesin; breflate; bropirimine; budotitane; buthionine sulfoximine; calcipotriol; calphostin C; camptothecin derivatives; canarypox IL-2; capecitabine; carboxamide-amino-triazole; carboxyamidotriazole; CaRest M3; CARN 700; cartilage derived inhibitor; carzelesin; casein kinase inhibitors (ICOS); castanospermine; cecropin B; cetrorelix; chlorins; chloroquinoxaline sulfonamide; cicaprost; cis-porphyrin; cladribine; clomifene analogues; clotrimazole; collismycin A; collismycin B; combretastatin A4; combretastatin analogue; conagenin; crambescidin 816; crisnatol; cryptophycin 8; cryptophycin A derivatives; curacin A; cyclopentanthraquinones; cycloplatam; cypemycin; cytarabine ocfosfate; cytolytic factor; cytostatin; dacliximab; decitabine; dehydrodidemnin B; deslorelin; dexamethasone; dexifosfamide; dexrazoxane; dexverapamil; diaziquone; didemnin B; didox; diethylnorspermine; dihydro-5-azacytidine; 9-dioxamycin; diphenyl spiromustine; docosanol; dolasetron; doxifluridine; droloxifene; dronabinol; duocarmycin SA; ebselen; ecomustine; edelfosine; edrecolomab; eflornithine; elemene; emitefur; epirubicin; epristeride; estramustine analogue; estrogen agonists; estrogen antagonists; etanidazole; etoposide phosphate; exemestane; fadrozole; fazarabine; fenretinide; filgrastim; finasteride; flavopiridol; flezelastine; fluasterone; fludarabine; fluorodaunorunicin hydrochloride; forfenimex; formestane; fostriecin; fotemustine; gadolinium texaphyrin; gallium nitrate; galocitabine; ganirelix; gelatinase inhibitors; gemcitabine; glutathione inhibitors; hepsulfam; heregulin; hexamethylene bisacetamide; hypericin; ibandronic acid; idarubicin; idoxifene; idramantone; ilmofosine; ilomastat; imidazoacridones; imiquimod; immunostimulant peptides; insulin-like growth factor-1 receptor inhibitor; interferon agonists; interferons; interleukins; iobenguane; iododoxorubicin; ipomeanol, 4-; iroplact; irsogladine; isobengazole; isohomohalicondrin B; itasetron; jasplakinolide; kahalalide F; lamellarin-N triacetate; lanreotide; leinamycin; lenograstim; lentinan sulfate; leptolstatin; letrozole; leukemia inhibiting factor; leukocyte alpha interferon; leuprolide+estrogen+progesterone; leuprorelin; levamisole; liarozole; linear polyamine analogue; lipophilic disaccharide peptide; lipophilic platinum compounds; lissoclinamide 7; lobaplatin; lombricine; lometrexol; lonidamine; losoxantrone; lovastatin; loxoribine; lurtotecan; lutetium texaphyrin; lysofylline; lytic peptides; maitansine; mannostatin A; marimastat; masoprocol; maspin; matrilysin inhibitors; matrix metalloproteinase inhibitors; menogaril; merbarone; meterelin; methioninase; metoclopramide; MIF inhibitor; mifepristone; miltefosine; mirimostim; mismatched double stranded RNA; mitoguazone; mitolactol; mitomycin analogues; mitonafide; mitotoxin fibroblast growth factor-saporin; mitoxantrone; mofarotene; molgramostim; monoclonal antibody, human chorionic gonadotrophin; monophosphoryl lipid A+myobacterium cell wall sk; mopidamol; multiple drug resistance gene inhibitor; multiple tumor suppressor 1-based therapy; mustard anticancer agent; mycaperoxide B; mycobacterial cell wall extract; myriaporone; N-acetyldinaline; N-substituted benzamides; nafarelin; nagrestip; naloxone+pentazocine; napavin; naphterpin; nartograstim; nedaplatin; nemorubicin; neridronic acid; neutral endopeptidase; nilutamide; nisamycin; nitric oxide modulators; nitroxide antioxidant; nitrullyn; O6-benzylguanine; octreotide; okicenone; oligonucleotides; onapristone; ondansetron; ondansetron; oracin; oral cytokine inducer; ormaplatin; osaterone; oxaliplatin; oxaunomycin; palauamine; palmitoylrhizoxin; pamidronic acid; panaxytriol; panomifene; parabactin; pazelliptine; pegaspargase; peldesine; pentosan polysulfate sodium; pentostatin; pentrozole; perflubron; perfosfamide; perillyl alcohol; phenazinomycin; phenylacetate; phosphatase inhibitors; picibanil; pilocarpine hydrochloride; pirarubicin; piritrexim; placetin A; placetin B; plasminogen activator inhibitor; platinum complex; platinum compounds; platinum-triamine complex; porfimer sodium; porfiromycin; prednisone; propyl bis-acridone; prostaglandin J2; proteasome inhibitors; protein A-based immune modulator; protein kinase C inhibitor; protein kinase C inhibitors, microalgal; protein tyrosine phosphatase inhibitors; purine nucleoside phosphorylase inhibitors; purpurins; pyrazoloacridine; pyridoxylated hemoglobin polyoxyethylerie conjugate; raf antagonists; raltitrexed; ramosetron; ras farnesyl protein transferase inhibitors; ras inhibitors; ras-GAP inhibitor; retelliptine demethylated; rhenium Re 186 etidronate; rhizoxin; ribozymes; RII retinamide; rogletimide; rohitukine; romurtide; roquinimex; rubiginone B1; ruboxyl; safingol; saintopin; SarCNU; sarcophytol A; sargramostim; Sdi 1 mimetics; semustine; senescence derived inhibitor 1; sense oligonucleotides; signal transduction inhibitors; signal transduction modulators; single chain antigen-binding protein; sizofuran; sobuzoxane; sodium borocaptate; sodium phenylacetate; solverol; somatomedin binding protein; sonermin; sparfosic acid; spicamycin D; spiromustine; splenopentin; spongistatin 1; squalamine; stem cell inhibitor; stem-cell division inhibitors; stipiamide; stromelysin inhibitors; sulfinosine; superactive vasoactive intestinal peptide antagonist; suradista; suramin; swainsonine; synthetic glycosaminoglycans; tallimustine; tamoxifen methiodide; tauromustine; tazarotene; tecogalan sodium; tegafur; tellurapyrylium; telomerase inhibitors; temoporfin; temozolomide; teniposide; tetrachlorodecaoxide; tetrazomine; thaliblastine; thiocoraline; thrombopoietin; thrombopoietin mimetic; thymalfasin; thymopoietin receptor agonist; thymotrinan; thyroid stimulating hormone; tin ethyl etiopurpurin; tirapazamine; titanocene bichloride; topsentin; toremifene; totipotent stem cell factor; translation inhibitors; tretinoin; triacetyluridine; triciribine; trimetrexate; triptorelin; tropisetron; turosteride; tyrosine kinase inhibitors; tyrphostins; UBC inhibitors; ubenimex; urogenital sinus-derived growth inhibitory factor; urokinase receptor antagonists; vapreotide; variolin B; vector system, erythrocyte gene therapy; velaresol; veramine; verdins; verteporfin; vinorelbine; vinxaltine; vitaxin; vorozole; zanoterone; zeniplatin; zilascorb; zinostatin stimalamer, Adriamycin, Dactinomycin, Bleomycin, Vinblastine, Cisplatin, acivicin; aclarubicin; acodazole hydrochloride; acronine; adozelesin; aldesleukin; altretamine; ambomycin; ametantrone acetate; aminoglutethimide; amsacrine; anastrozole; anthramycin; asparaginase; asperlin; azacitidine; azetepa; azotomycin; batimastat; benzodepa; bicalutamide; bisantrene hydrochloride; bisnafide dimesylate; bizelesin; bleomycin sulfate; brequinar sodium; bropirimine; busulfan; cactinomycin; calusterone; caracemide; carbetimer; carboplatin; carmustine; carubicin hydrochloride; carzelesin; cedefingol; chlorambucil; cirolemycin; cladribine; crisnatol mesylate; cyclophosphamide; cytarabine; dacarbazine; daunorubicin hydrochloride; decitabine; dexormaplatin; dezaguanine; dezaguanine mesylate; diaziquone; doxorubicin; doxorubicin hydrochloride; droloxifene; droloxifene citrate; dromostanolone propionate; duazomycin; edatrexate; eflornithine hydrochloride; elsamitrucin; enloplatin; enpromate; epipropidine; epirubicin hydrochloride; erbulozole; esorubicin hydrochloride; estramustine; estramustine phosphate sodium; etanidazole; etoposide; etoposide phosphate; etoprine; fadrozole hydrochloride; fazarabine; fenretinide; floxuridine; fludarabine phosphate; fluorouracil; fluorocitabine; fosquidone; fostriecin sodium; gemcitabine; gemcitabine hydrochloride; hydroxyurea; idarubicin hydrochloride; ifosfamide; iimofosine; interleukin I1 (including recombinant interleukin II, or r1L₂), interferon alfa-2a; interferon alfa-2b; interferon alfa-n1; interferon alfa-n3; interferon beta-1a; interferon gamma-1b; iproplatin; irinotecan hydrochloride; lanreotide acetate; letrozole; leuprolide acetate; liarozole hydrochloride; lometrexol sodium; lomustine; losoxantrone hydrochloride; masoprocol; maytansine; mechlorethamine hydrochloride; megestrol acetate; melengestrol acetate; melphalan; menogaril; mercaptopurine; methotrexate; methotrexate sodium; metoprine; meturedepa; mitindomide; mitocarcin; mitocromin; mitogillin; mitomalcin; mitomycin; mitosper; mitotane; mitoxantrone hydrochloride; mycophenolic acid; nocodazoie; nogalamycin; ormaplatin; oxisuran; pegaspargase; peliomycin; pentamustine; peplomycin sulfate; perfosfamide; pipobroman; piposulfan; piroxantrone hydrochloride; plicamycin; plomestane; porfimer sodium; porfiromycin; prednimustine; procarbazine hydrochloride; puromycin; puromycin hydrochloride; pyrazofurin; riboprine; rogletimide; safingol; safingol hydrochloride; semustine; simtrazene; sparfosate sodium; sparsomycin; spirogermanium hydrochloride; spiromustine; spiroplatin; streptonigrin; streptozocin; sulofenur; talisomycin; tecogalan sodium; tegafur; teloxantrone hydrochloride; temoporfin; teniposide; teroxirone; testolactone; thiamiprine; thioguanine; thiotepa; tiazofurin; tirapazamine; toremifene citrate; trestolone acetate; triciribine phosphate; trimetrexate; trimetrexate glucuronate; triptorelin; tubulozole hydrochloride; uracil mustard; uredepa; vapreotide; verteporfin; vinblastine sulfate; vincristine sulfate; vindesine; vindesine sulfate; vinepidine sulfate; vinglycinate sulfate; vinleurosine sulfate; vinorelbine tartrate; vinrosidine sulfate; vinzolidine sulfate; vorozole; zeniplatin; zinostatin; zorubicin hydrochloride, agents that arrest cells in the G2-M phases and/or modulate the formation or stability of microtubules, (e.g. Taxol™ (i.e. paclitaxel), Taxotere™, compounds comprising the taxane skeleton, Erbulozole (i.e. R-55104), Dolastatin 10 (i.e. DLS-10 and NSC-376128), Mivobulin isethionate (i.e. as CI-980), Vincristine, NSC-639829, Discodermolide (i.e. as NVP-XX-A-296), ABT-751 (Abbott, i.e. E-7010), Altorhyrtins (e.g. Altorhyrtin A and Altorhyrtin C), Spongistatins (e.g. Spongistatin 1, Spongistatin 2, Spongistatin 3, Spongistatin 4, Spongistatin 5, Spongistatin 6, Spongistatin 7, Spongistatin 8, and Spongistatin 9), Cemadotin hydrochloride (i.e. LU-103793 and NSC-D-669356), Epothilones (e.g. Epothilone A, Epothilone B, Epothilone C (i.e. desoxyepothilone A or dEpoA), Epothilone D (i.e. KOS-862, dEpoB, and desoxyepothilone B), Epothilone E, Epothilone F, Epothilone B N-oxide, Epothilone A N-oxide, 16-aza-epothilone B, 21-aminoepothilone B (i.e. BMS-310705), 21-hydroxyepothilone D (i.e. Desoxyepothilone F and dEpoF), 26-fluoroepothilone, Auristatin PE (i.e. NSC-654663), Soblidotin (i.e. TZT-1027), Vincristine sulfate, Cryptophycin 52 (i.e. LY-355703), Vitilevuamide, Tubulysin A, Canadensol, Centaureidin (i.e. NSC-106969), Oncocidin A1 (i.e. BTO-956 and DIME), Fijianolide B, Laulimalide, Narcosine (also known as NSC-5366), Nascapine, Hemiasterlin, Vanadocene acetylacetonate, Monsatrol, lnanocine (i.e. NSC-698666), Eleutherobins (such as Desmethyleleutherobin, Desaetyleleutherobin, lsoeleutherobin A, and Z-Eleutherobin), Caribaeoside, Caribaeolin, Halichondrin B, Diazonamide A, Taccalonolide A, Diozostatin, (−)-Phenylahistin (i.e. NSCL-96F037), Myoseverin B, Resverastatin phosphate sodium, steroids (e.g., dexamethasone), finasteride, aromatase inhibitors, gonadotropin-releasing hormone agonists (GnRH) such as goserelin or leuprolide, adrenocorticosteroids (e.g., prednisone), progestins (e.g., hydroxyprogesterone caproate, megestrol acetate, medroxyprogesterone acetate), estrogens (e.g., diethlystilbestrol, ethinyl estradiol), antiestrogen (e.g., tamoxifen), androgens (e.g., testosterone propionate, fluoxymesterone), antiandrogen (e.g., flutamide), immunostimulants (e.g., Bacillus Calmette-Guérin (BCG), levamisole, interleukin-2, alpha-interferon, etc.), monoclonal antibodies (e.g., anti-CD20, anti-HER2, anti-CD52, anti-HLA-DR, and anti-VEGF monoclonal antibodies), immunotoxins (e.g., anti-CD33 monoclonal antibody-calicheamicin conjugate, anti-CD22 monoclonal antibody-pseudomonas exotoxin conjugate, etc.), radioimmunotherapy (e.g., anti-CD20 monoclonal antibody conjugated to ¹¹¹In, ⁹⁰Y or ¹³¹I, etc.), triptolide, homoharringtonine, dactinomycin, doxorubicin, epirubicin, topotecan, itraconazole, vindesine, cerivastatin, vincristine, deoxyadenosine, sertraline, pitavastatin, irinotecan, clofazimine, 5-nonyloxytryptamine, vemurafenib, dabrafenib, erlotinib, gefitinib, EGFR inhibitors, epidermal growth factor receptor (EGFR)-targeted therapy or therapeutic (e.g. gefitinib (Iressa™), erlotinib (Tarceva™), cetuximab (Erbitux™), lapatinib (Tykerb™), panitumumab (Vectibix™), vandetanib (Caprelsa™), afatinib/BIBW2992, CI-1033/canertinib, neratinib/HKI-272, CP-724714, TAK-285, AST-1306, ARRY334543, ARRY-380, AG-1478, dacomitinib/PF299804, OSI-420/desmethyl erlotinib, AZD8931, AEE788, pelitinib/EKB-569, CUDC-101, WZ8040, WZ4002, WZ3146, AG-490, XL647, PD153035, BMS-599626), sorafenib, imatinib, sunitinib, dasatinib, hormonal therapies, or the like. Cancer model organism, as used herein, is an organism exhibiting a phenotype indicative of cancer, or the activity of cancer causing elements, within the organism. The term cancer is defined above. A wide variety of organisms may serve as cancer model organisms, and include for example, cancer cells and mammalian organisms such as rodents (e.g. mouse or rat) and primates (such as humans). Cancer cell lines are widely understood by those skilled in the art as cells exhibiting phenotypes or genotypes similar to in vivo cancers. Cancer cell lines as used herein includes cell lines from animals (e.g. mice) and from humans.

[0182] As defined herein the terms “immune checkpoint”, “immune checkpoint protein” or “checkpoint protein” may be used interchangeably and refer to compositions (molecules) capable of modulating the duration and amplitude of physiological immune responses (e.g., attenuate and/or eliminate sustained immune cell activation, hus regulating normal immune homeostasis). Immune checkpoint proteins may stimulate (increase) an immune response. In embodiments, the checkpoint protein is a cellular receptor. Examples, of stimulatory checkpoint molecules include, but are not limited to, members of the tumor necrosis factor (TNF) receptor superfamily (e.g. CD27, CD40, OX40, glucocorticoid-induced TNFR family related gene (GITR), and CD137), members of the B7-CD28 superfamily (e.g. CD28 itself and Inducible T-cell costimulator (ICOS)). Alternatively, immune checkpoint proteins may inhibit (decrease) an immune response. Examples of inhibitory checkpoint molecules include, but are not limited to, adenosine A2A receptor (A2AR), B7-H3, B7-H4, BTLA, CTLA-4, indoleamine 2,3-dioxygenase (IDO), killer immunoglobulin-like receptors (KIR), LAG3, PD-1, TIM-3, and V-domain immunoglobulin suppressor of T-cell activation (VISTA) protein.

[0183] Likewise, an “immune checkpoint inhibitor” or “checkpoint inhibitor” as provided herein refers to a substance (e.g., an antibody or fragment thereof, a small molecule) that is capable of inhibiting, negatively affecting (e.g., decreasing) the activity or function of a checkpoint protein (e.g., decreasing expression or decreasing the activity of a checkpoint protein) relative to the activity or function of the checkpoint protein in the absence of the inhibitor. The checkpoint inhibitor may at least in part, partially or totally block stimulation, decrease, prevent, or delay activation, or inactivate, desensitize, or down-regulate signal transduction or enzymatic activity or the amount of a checkpoint protein. A checkpoint inhibitor may inhibit a checkpoint protein, e.g., by binding, partially or totally blocking, decreasing, preventing, delaying, inactivating, desensitizing, or down-regulating activity of the checkpoint protein. In embodiments, the checkpoint inhibitor is an antibody. In embodiments, the checkpoint inhibitor is an antibody fragment. In embodiments, the checkpoint inhibitor is an antibody variant. In embodiments, the checkpoint inhibitor is a scFv. In embodiments, the checkpoint inhibitor is an anti-CTLA-4 antibody. In embodiments, the checkpoint inhibitor is an anti-PD1 antibody. In embodiments, the checkpoint inhibitor is an anti-PD-L1 antibody. In embodiments, the checkpoint inhibitor is an anti-LAG-3 antibody. In embodiments, the checkpoint inhibitor is an anti-IgG1k antibody. In embodiments, the checkpoint inhibitor is an anti-CD25 antibody. In embodiments, the checkpoint inhibitor is an anti-IL2R antibody. In embodiments, the checkpoint inhibitor forms part of an oncolytic virus. Non-limiting examples of checkpoint inhibitors include ipilimumab, pembrolizumab, nivolumab, talimogene laherparepvec, durvalumab, daclizumab, avelumab, and atezolizumab.

[0184] The term “aberrant” as used herein refers to different from normal. When used to describe enzymatic activity, aberrant refers to activity that is greater or less than a normal control or the average of normal non-diseased control samples. Aberrant activity may refer to an amount of activity that results in a disease, wherein returning the aberrant activity to a normal or non-disease-associated amount (e.g. by using a method as described herein), results in reduction of the disease or one or more disease symptoms.

[0185] As defined herein, the term “activation”, “activate”, “activating”, “activator” and the like in reference to a protein-inhibitor interaction means positively affecting (e.g. increasing) the activity or function of the protein relative to the activity or function of the protein in the absence of the activator. In embodiments activation means positively affecting (e.g. increasing) the concentration or levels of the protein relative to the concentration or level of the protein in the absence of the activator. The terms may reference activation, or activating, sensitizing, or up-regulating signal transduction or enzymatic activity or the amount of a protein decreased in a disease. Thus, activation may include, at least in part, partially or totally increasing stimulation, increasing or enabling activation, or activating, sensitizing, or up-regulating signal transduction or enzymatic activity or the amount of a protein associated with a disease (e.g., a protein which is decreased in a disease relative to a non-diseased control). Activation may include, at least in part, partially or totally increasing stimulation, increasing or enabling activation, or activating, sensitizing, or up-regulating signal transduction or enzymatic activity or the amount of a protein

[0186] The terms “agonist,” “activator,” “upregulator,” etc. refer to a substance capable of detectably increasing the expression or activity of a given gene or protein. The agonist can increase expression or activity 10%, 20%, 30%, 40%, 50%, 60%, 70%, 80%, 90% or more in comparison to a control in the absence of the agonist. In certain instances, expression or activity is 1.5-fold, 2-fold, 3-fold, 4-fold, 5-fold, 10-fold or higher than the expression or activity in the absence of the agonist.

[0187] As defined herein, the term “inhibition”, “inhibit”, “inhibiting” and the like in reference to a protein-inhibitor interaction means negatively affecting (e.g. decreasing) the activity or function of the protein relative to the activity or function of the protein in the absence of the inhibitor. In embodiments inhibition means negatively affecting (e.g. decreasing) the concentration or levels of the protein relative to the concentration or level of the protein in the absence of the inhibitor. In embodiments inhibition refers to reduction of a disease or symptoms of disease. In embodiments, inhibition refers to a reduction in the activity of a particular protein target. Thus, inhibition includes, at least in part, partially or totally blocking stimulation, decreasing, preventing, or delaying activation, or inactivating, desensitizing, or down-regulating signal transduction or enzymatic activity or the amount of a protein. In embodiments, inhibition refers to a reduction of activity of a target protein resulting from a direct interaction (e.g. an inhibitor binds to the target protein). In embodiments, inhibition refers to a reduction of activity of a target protein from an indirect interaction (e.g. an inhibitor binds to a protein that activates the target protein, thereby preventing target protein activation).

[0188] The terms “inhibitor,” “repressor” or “antagonist” or “downregulator” interchangeably refer to a substance capable of detectably decreasing the expression or activity of a given gene or protein. The antagonist can decrease expression or activity 10%, 20%, 30%, 40%, 50%, 60%, 70%, 80%, 90% or more in comparison to a control in the absence of the antagonist. In certain instances, expression or activity is 1.5-fold, 2-fold, 3-fold, 4-fold, 5-fold, 10-fold or lower than the expression or activity in the absence of the antagonist.

[0189] The term “modulator” refers to a composition that increases or decreases the level of a target molecule or the function of a target molecule or the physical state of the target of the molecule relative to the absence of the modulator.

[0190] The term “modulate” is used in accordance with its plain ordinary meaning and refers to the act of changing or varying one or more properties. “Modulation” refers to the process of changing or varying one or more properties. For example, as applied to the effects of a modulator on a target protein, to modulate means to change by increasing or decreasing a property or function of the target molecule or the amount of the target molecule.

[0191] The term “associated” or “associated with” in the context of a substance or substance activity or function associated with a disease (e.g. a protein associated disease, a cancer (e.g., cancer, inflammatory disease, autoimmune disease, or infectious disease)) means that the disease (e.g. cancer, inflammatory disease, autoimmune disease, or infectious disease) is caused by (in whole or in part), or a symptom of the disease is caused by (in whole or in part) the substance or substance activity or function. As used herein, what is described as being associated with a disease, if a causative agent, could be a target for treatment of the disease.

[0192] The term “aberrant” as used herein refers to different from normal. When used to describe enzymatic activity or protein function, aberrant refers to activity or function that is greater or less than a normal control or the average of normal non-diseased control samples. Aberrant activity may refer to an amount of activity that results in a disease, wherein returning the aberrant activity to a normal or non-disease-associated amount (e.g. by administering a compound or using a method as described herein), results in reduction of the disease or one or more disease symptoms.

[0193] The term “diagnosis” refers to a relative probability that a disease (e.g. cancer) is present in the subject. Similarly, the term “prognosis” refers to a relative probability that a certain future outcome may occur in the subject with respect to a disease state. For example, in the context of the present invention, prognosis can refer to the likelihood that an individual will develop a disease (e.g. cancer), or the likely severity of the disease (e.g., duration of disease). The terms are not intended to be absolute, as will be appreciated by any one of skill in the field of medical diagnostics.

[0194] “Biological sample” or “sample” refer to materials obtained from or derived from a subject or patient. A biological sample includes sections of tissues such as biopsy and autopsy samples, and frozen sections taken for histological purposes. Such samples include bodily fluids such as blood and blood fractions or products (e.g., serum, plasma, platelets, red blood cells, and the like), sputum, tissue, cultured cells (e.g., primary cultures, explants, and transformed cells) stool, urine, synovial fluid, joint tissue, synovial tissue, synoviocytes, fibroblast-like synoviocytes, macrophage-like synoviocytes, immune cells, hematopoietic cells, fibroblasts, macrophages, T cells, etc. A biological sample is typically obtained from a eukaryotic organism, such as a mammal such as a primate e.g., chimpanzee or human; cow; dog; cat; a rodent, e.g., guinea pig, rat, mouse; rabbit; or a bird; reptile; or fish.

[0195] The term “signaling pathway” as used herein refers to a series of interactions between cellular and optionally extra-cellular components (e.g. proteins, nucleic acids, small molecules, ions, lipids) that conveys a change in one component to one or more other components, which in turn may convey a change to additional components, which is optionally propagated to other signaling pathway components.

[0196] In this disclosure, “comprises,” “comprising,” “containing” and “having” and the like can have the meaning ascribed to them in U.S. patent law and can mean “includes,” “including,” and the like. “Consisting essentially of or “consists essentially” likewise has the meaning ascribed in U.S. patent law and the term is open-ended, allowing for the presence of more than that which is recited so long as basic or novel characteristics of that which is recited is not changed by the presence of more than that which is recited, but excludes prior art embodiments.

### II. Viral Compositions

[0197] Provided herein are compositions and methods, that are, inter alia, useful for the treatment of cancer (e.g., ovarian cancer, metastatic ovarian cancer). The compositions provided herein include neural stem cells including chimeric poxviruses. Where the neural stem cell includes a chimeric poxvirus, the neural stem cell includes one or more copies of the genome of the chimeric poxvirus, chimeric poxvirus particles or a combination thereof. The neural stem cell provided herein may be used for targeted delivery of the chimeric poxvirus to the site of a cancer or metastatic cells of such cancer. Upon delivery of the chimeric poxvirus to the cancer site by said neural stem cell the chimeric poxvirus is able to specifically infect the cancer cell, replicate in said cancer cell and upon viral release lyse said cancer cell. The chimeric poxvirus replicates selectively within cancer cells until they lyse and release the chimeric poxvirus to surrounding cancer cells, amplifying its therapeutic effect until normal cells (healthy cells) are reached. In embodiments, the chimeric poxvirus is CF33. CF33 as referred to herein is a chimeric poxvirus encoded by a nucleic acid sequence having a sequence of SEQ ID NO:1. CF17 as referred to herein is a chimeric poxvirus encoded by a nucleic acid sequence having a sequence of SEQ ID NO:2.

### Chimeric Poxviruses:

[0198] In embodiments, the chimeric poxvirus is encoded by a nucleic acid sequence having a sequence identity of at least 70% to SEQ ID NO:1. In embodiments, the nucleic acid sequence has a sequence identity of at least 71% to SEQ ID NO:1. In embodiments, the nucleic acid sequence has a sequence identity of at least 72% to SEQ ID NO:1. In embodiments, the nucleic acid sequence has a sequence identity of at least 73% to SEQ ID NO:1. In embodiments, the nucleic acid sequence has a sequence identity of at least 74% to SEQ ID NO:1. In embodiments, the nucleic acid sequence has a sequence identity of at least 75% to SEQ ID NO:1. In embodiments, the nucleic acid sequence has a sequence identity of at least 76% to SEQ ID NO:1. In embodiments, the nucleic acid sequence has a sequence identity of at least 77% to SEQ ID NO:1. In embodiments, the nucleic acid sequence has a sequence identity of at least 78% to SEQ ID NO:1. In embodiments, the nucleic acid sequence has a sequence identity of at least 79% to SEQ ID NO:1. In embodiments, the nucleic acid sequence has a sequence identity of at least 80% to SEQ ID NO:1.

[0199] In embodiments, the nucleic acid sequence has a sequence identity of at least 81% to SEQ ID NO:1. In embodiments, the nucleic acid sequence has a sequence identity of at least 82% to SEQ ID NO:1. In embodiments, the nucleic acid sequence has a sequence identity of at least 83% to SEQ ID NO:1. In embodiments, the nucleic acid sequence has a sequence identity of at least 84% to SEQ ID NO:1. In embodiments, the nucleic acid sequence has a sequence identity of at least 85% to SEQ ID NO:1. In embodiments, the nucleic acid sequence has a sequence identity of at least 86% to SEQ ID NO:1. In embodiments, the nucleic acid sequence has a sequence identity of at least 87% to SEQ ID NO:1. In embodiments, the nucleic acid sequence has a sequence identity of at least 88% to SEQ ID NO:1. In embodiments, the nucleic acid sequence has a sequence identity of at least 89% to SEQ ID NO:1. In embodiments, the nucleic acid sequence has a sequence identity of at least 90% to SEQ ID NO:1.

[0200] In embodiments, the nucleic acid sequence has a sequence identity of at least 91% to SEQ ID NO:1. In embodiments, the nucleic acid sequence has a sequence identity of at least 92% to SEQ ID NO:1. In embodiments, the nucleic acid sequence has a sequence identity of at least 93% to SEQ ID NO:1. In embodiments, the nucleic acid sequence has a sequence identity of at least 94% to SEQ ID NO:1. In embodiments, the nucleic acid sequence has a sequence identity of at least 95% to SEQ ID NO:1. In embodiments, the nucleic acid sequence has a sequence identity of at least 96% to SEQ ID NO:1. In embodiments, the nucleic acid sequence has a sequence identity of at least 97% to SEQ ID NO:1. In embodiments, the nucleic acid sequence has a sequence identity of at least 98% to SEQ ID NO:1. In embodiments, the nucleic acid sequence has a sequence identity of at least 99% to SEQ ID NO:1.

[0201] In embodiments, the nucleic acid sequence has a sequence identity of at least 71% to SEQ ID NO:2. In embodiments, the nucleic acid sequence has a sequence identity of at least 72% to SEQ ID NO:2. In embodiments, the nucleic acid sequence has a sequence identity of at least 73% to SEQ ID NO:2. In embodiments, the nucleic acid sequence has a sequence identity of at least 74% to SEQ ID NO:2. In embodiments, the nucleic acid sequence has a sequence identity of at least 75% to SEQ ID NO:2. In embodiments, the nucleic acid sequence has a sequence identity of at least 76% to SEQ ID NO:2. In embodiments, the nucleic acid sequence has a sequence identity of at least 77% to SEQ ID NO:2. In embodiments, the nucleic acid sequence has a sequence identity of at least 78% to SEQ ID NO:2. In embodiments, the nucleic acid sequence has a sequence identity of at least 79% to SEQ ID NO:2. In embodiments, the nucleic acid sequence has a sequence identity of at least 80% to SEQ ID NO:2.

[0202] In embodiments, the nucleic acid sequence has a sequence identity of at least 81% to SEQ ID NO:2. In embodiments, the nucleic acid sequence has a sequence identity of at least 82% to SEQ ID NO:2. In embodiments, the nucleic acid sequence has a sequence identity of at least 83% to SEQ ID NO:2. In embodiments, the nucleic acid sequence has a sequence identity of at least 84% to SEQ ID NO:2. In embodiments, the nucleic acid sequence has a sequence identity of at least 85% to SEQ ID NO:2. In embodiments, the nucleic acid sequence has a sequence identity of at least 86% to SEQ ID NO:2. In embodiments, the nucleic acid sequence has a sequence identity of at least 87% to SEQ ID NO:2. In embodiments, the nucleic acid sequence has a sequence identity of at least 88% to SEQ ID NO:2. In embodiments, the nucleic acid sequence has a sequence identity of at least 89% to SEQ ID NO:2. In embodiments, the nucleic acid sequence has a sequence identity of at least 90% to SEQ ID NO:2.

[0203] In embodiments, the nucleic acid sequence has a sequence identity of at least 91% to SEQ ID NO:2. In embodiments, the nucleic acid sequence has a sequence identity of at least 92% to SEQ ID NO:2. In embodiments, the nucleic acid sequence has a sequence identity of at least 93% to SEQ ID NO:2. In embodiments, the nucleic acid sequence has a sequence identity of at least 94% to SEQ ID NO:2. In embodiments, the nucleic acid sequence has a sequence identity of at least 95% to SEQ ID NO:2. In embodiments, the nucleic acid sequence has a sequence identity of at least 96% to SEQ ID NO:2. In embodiments, the nucleic acid sequence has a sequence identity of at least 97% to SEQ ID NO:2. In embodiments, the nucleic acid sequence has a sequence identity of at least 98% to SEQ ID NO:2. In embodiments, the nucleic acid sequence has a sequence identity of at least 99% to SEQ ID NO:2.

[0204] In embodiments, the nucleic acid sequence has a sequence identity of 71% to SEQ ID NO:1. In embodiments, the nucleic acid sequence has a sequence identity of 72% to SEQ ID NO:1. In embodiments, the nucleic acid sequence has a sequence identity of 73% to SEQ ID NO:1. In embodiments, the nucleic acid sequence has a sequence identity of 74% to SEQ ID NO:1. In embodiments, the nucleic acid sequence has a sequence identity of 75% to SEQ ID NO:1. In embodiments, the nucleic acid sequence has a sequence identity of 76% to SEQ ID NO:1. In embodiments, the nucleic acid sequence has a sequence identity of 77% to SEQ ID NO:1. In embodiments, the nucleic acid sequence has a sequence identity of 78% to SEQ ID NO:1. In embodiments, the nucleic acid sequence has a sequence identity of 79% to SEQ ID NO:1. In embodiments, the nucleic acid sequence has a sequence identity of 80% to SEQ ID NO:1.

[0205] In embodiments, the nucleic acid sequence has a sequence identity of 81% to SEQ ID NO:1. In embodiments, the nucleic acid sequence has a sequence identity of 82% to SEQ ID NO:1. In embodiments, the nucleic acid sequence has a sequence identity of 83% to SEQ ID NO:1. In embodiments, the nucleic acid sequence has a sequence identity of 84% to SEQ ID NO:1. In embodiments, the nucleic acid sequence has a sequence identity of 85% to SEQ ID NO:1. In embodiments, the nucleic acid sequence has a sequence identity of 86% to SEQ ID NO:1. In embodiments, the nucleic acid sequence has a sequence identity of 87% to SEQ ID NO:1. In embodiments, the nucleic acid sequence has a sequence identity of 88% to SEQ ID NO:1. In embodiments, the nucleic acid sequence has a sequence identity of 89% to SEQ ID NO:1. In embodiments, the nucleic acid sequence has a sequence identity of 90% to SEQ ID NO:1.

[0206] In embodiments, the nucleic acid sequence has a sequence identity of 91% to SEQ ID NO:1. In embodiments, the nucleic acid sequence has a sequence identity of 92% to SEQ ID NO:1. In embodiments, the nucleic acid sequence has a sequence identity of 93% to SEQ ID NO:1. In embodiments, the nucleic acid sequence has a sequence identity of 94% to SEQ ID NO:1. In embodiments, the nucleic acid sequence has a sequence identity of 95% to SEQ ID NO:1. In embodiments, the nucleic acid sequence has a sequence identity of 96% to SEQ ID NO:1. In embodiments, the nucleic acid sequence has a sequence identity of 97% to SEQ ID NO:1. In embodiments, the nucleic acid sequence has a sequence identity of 98% to SEQ ID NO:1. In embodiments, the nucleic acid sequence has a sequence identity of 99% to SEQ ID NO:1. In embodiments, the nucleic acid sequence is the sequence of SEQ ID NO:1.

[0207] In embodiments, the nucleic acid sequence has a sequence identity of 71% to SEQ ID NO:2. In embodiments, the nucleic acid sequence has a sequence identity of 72% to SEQ ID NO:2. In embodiments, the nucleic acid sequence has a sequence identity of 73% to SEQ ID NO:2. In embodiments, the nucleic acid sequence has a sequence identity of 74% to SEQ ID NO:2. In embodiments, the nucleic acid sequence has a sequence identity of 75% to SEQ ID NO:2. In embodiments, the nucleic acid sequence has a sequence identity of 76% to SEQ ID NO:2. In embodiments, the nucleic acid sequence has a sequence identity of 77% to SEQ ID NO:2. In embodiments, the nucleic acid sequence has a sequence identity of 78% to SEQ ID NO:2. In embodiments, the nucleic acid sequence has a sequence identity of 79% to SEQ ID NO:2. In embodiments, the nucleic acid sequence has a sequence identity of 80% to SEQ ID NO:2.

[0208] In embodiments, the nucleic acid sequence has a sequence identity of 81% to SEQ ID NO:2. In embodiments, the nucleic acid sequence has a sequence identity of 82% to SEQ ID NO:2. In embodiments, the nucleic acid sequence has a sequence identity of 83% to SEQ ID NO:2. In embodiments, the nucleic acid sequence has a sequence identity of 84% to SEQ ID NO:2. In embodiments, the nucleic acid sequence has a sequence identity of 85% to SEQ ID NO:2. In embodiments, the nucleic acid sequence has a sequence identity of 86% to SEQ ID NO:2. In embodiments, the nucleic acid sequence has a sequence identity of 87% to SEQ ID NO:2. In embodiments, the nucleic acid sequence has a sequence identity of 88% to SEQ ID NO:2. In embodiments, the nucleic acid sequence has a sequence identity of 89% to SEQ ID NO:2. In embodiments, the nucleic acid sequence has a sequence identity of 90% to SEQ ID NO:2.

[0209] In embodiments, the nucleic acid sequence has a sequence identity of 91% to SEQ ID NO:2. In embodiments, the nucleic acid sequence has a sequence identity of 92% to SEQ ID NO:2. In embodiments, the nucleic acid sequence has a sequence identity of 93% to SEQ ID NO:2. In embodiments, the nucleic acid sequence has a sequence identity of 94% to SEQ ID NO:2. In embodiments, the nucleic acid sequence has a sequence identity of 95% to SEQ ID NO:2. In embodiments, the nucleic acid sequence has a sequence identity of 96% to SEQ ID NO:2. In embodiments, the nucleic acid sequence has a sequence identity of 97% to SEQ ID NO:2. In embodiments, the nucleic acid sequence has a sequence identity of 98% to SEQ ID NO:2. In embodiments, the nucleic acid sequence has a sequence identity of 99% to SEQ ID NO:2. In embodiments, the nucleic acid sequence is the sequence of SEQ ID NO:1.

[0210] In embodiments, the nucleic acid sequence has a sequence identity of about 71% to SEQ ID NO:1. In embodiments, the nucleic acid sequence has a sequence identity of about 72% to SEQ ID NO:1. In embodiments, the nucleic acid sequence has a sequence identity of about 73% to SEQ ID NO:1. In embodiments, the nucleic acid sequence has a sequence identity of about 74% to SEQ ID NO:1. In embodiments, the nucleic acid sequence has a sequence identity of about 75% to SEQ ID NO:1. In embodiments, the nucleic acid sequence has a sequence identity of about 76% to SEQ ID NO:1. In embodiments, the nucleic acid sequence has a sequence identity of about 77% to SEQ ID NO:1. In embodiments, the nucleic acid sequence has a sequence identity of about 78% to SEQ ID NO:1. In embodiments, the nucleic acid sequence has a sequence identity of about 79% to SEQ ID NO:1. In embodiments, the nucleic acid sequence has a sequence identity of about 80% to SEQ ID NO:1.

[0211] In embodiments, the nucleic acid sequence has a sequence identity of about 81% to SEQ ID NO:1. In embodiments, the nucleic acid sequence has a sequence identity of about 82% to SEQ ID NO:1. In embodiments, the nucleic acid sequence has a sequence identity of about 83% to SEQ ID NO:1. In embodiments, the nucleic acid sequence has a sequence identity of about 84% to SEQ ID NO:1. In embodiments, the nucleic acid sequence has a sequence identity of about 85% to SEQ ID NO:1. In embodiments, the nucleic acid sequence has a sequence identity of about 86% to SEQ ID NO:1. In embodiments, the nucleic acid sequence has a sequence identity of about 87% to SEQ ID NO:1. In embodiments, the nucleic acid sequence has a sequence identity of about 88% to SEQ ID NO:1. In embodiments, the nucleic acid sequence has a sequence identity of about 89% to SEQ ID NO:1. In embodiments, the nucleic acid sequence has a sequence identity of about 90% to SEQ ID NO:1.

[0212] In embodiments, the nucleic acid sequence has a sequence identity of about 91% to SEQ ID NO:1. In embodiments, the nucleic acid sequence has a sequence identity of about 92% to SEQ ID NO:1. In embodiments, the nucleic acid sequence has a sequence identity of about 93% to SEQ ID NO:1. In embodiments, the nucleic acid sequence has a sequence identity of about 94% to SEQ ID NO:1. In embodiments, the nucleic acid sequence has a sequence identity of about 95% to SEQ ID NO:1. In embodiments, the nucleic acid sequence has a sequence identity of about 96% to SEQ ID NO:1. In embodiments, the nucleic acid sequence has a sequence identity of about 97% to SEQ ID NO:1. In embodiments, the nucleic acid sequence has a sequence identity of about 98% to SEQ ID NO:1. In embodiments, the nucleic acid sequence has a sequence identity of about 99% to SEQ ID NO:1.

[0213] In embodiments, the nucleic acid sequence has a sequence identity of about 71% to SEQ ID NO:2. In embodiments, the nucleic acid sequence has a sequence identity of about 72% to SEQ ID NO:2. In embodiments, the nucleic acid sequence has a sequence identity of about 73% to SEQ ID NO:2. In embodiments, the nucleic acid sequence has a sequence identity of about 74% to SEQ ID NO:2. In embodiments, the nucleic acid sequence has a sequence identity of about 75% to SEQ ID NO:2. In embodiments, the nucleic acid sequence has a sequence identity of about 76% to SEQ ID NO:2. In embodiments, the nucleic acid sequence has a sequence identity of about 77% to SEQ ID NO:2. In embodiments, the nucleic acid sequence has a sequence identity of about 78% to SEQ ID NO:2. In embodiments, the nucleic acid sequence has a sequence identity of about 79% to SEQ ID NO:2. In embodiments, the nucleic acid sequence has a sequence identity of about 80% to SEQ ID NO:2.

[0214] In embodiments, the nucleic acid sequence has a sequence identity of about 81% to SEQ ID NO:2. In embodiments, the nucleic acid sequence has a sequence identity of about 82% to SEQ ID NO:2. In embodiments, the nucleic acid sequence has a sequence identity of about 83% to SEQ ID NO:2. In embodiments, the nucleic acid sequence has a sequence identity of about 84% to SEQ ID NO:2. In embodiments, the nucleic acid sequence has a sequence identity of about 85% to SEQ ID NO:2. In embodiments, the nucleic acid sequence has a sequence identity of about 86% to SEQ ID NO:2. In embodiments, the nucleic acid sequence has a sequence identity of about 87% to SEQ ID NO:2. In embodiments, the nucleic acid sequence has a sequence identity of about 88% to SEQ ID NO:2. In embodiments, the nucleic acid sequence has a sequence identity of about 89% to SEQ ID NO:2. In embodiments, the nucleic acid sequence has a sequence identity of about 90% to SEQ ID NO:2.

[0215] In embodiments, the nucleic acid sequence has a sequence identity of about 91% to SEQ ID NO:2. In embodiments, the nucleic acid sequence has a sequence identity of about 92% to SEQ ID NO:2. In embodiments, the nucleic acid sequence has a sequence identity of about 93% to SEQ ID NO:2. In embodiments, the nucleic acid sequence has a sequence identity of about 94% to SEQ ID NO:2. In embodiments, the nucleic acid sequence has a sequence identity of about 95% to SEQ ID NO:2. In embodiments, the nucleic acid sequence has a sequence identity of about 96% to SEQ ID NO:2. In embodiments, the nucleic acid sequence has a sequence identity of about 97% to SEQ ID NO:2. In embodiments, the nucleic acid sequence has a sequence identity of about 98% to SEQ ID NO:2. In embodiments, the nucleic acid sequence has a sequence identity of about 99% to SEQ ID NO:2.

[0216] The nucleic acid sequence may have a sequence identity of at least 70%, and the nucleic acid sequence having at least 70% sequence identity may be contiguous. In embodiments, the nucleic acid sequence has a sequence identity of at least 70%, and the nucleic acid sequence having at least 70% sequence identity is a non-contiguous sequence. A “non-contiguous sequence” as provided herein refers to a sequence including one or more sequence fragments having no sequence identity to SEQ ID NO:1 or SEQ ID NO:2. In embodiments, the non-contiguous sequence is a sequence including a first sequence fragment having at least 70% sequence identity to SEQ ID NO:1 or SEQ ID NO:2 connected to a second sequence fragment having at least 70% sequence identity to SEQ ID NO:1 or SEQ ID NO:2 through a sequence fragment having no sequence identity to SEQ ID NO:1 or SEQ ID NO:2. In embodiments, the non-contiguous sequence is a sequence including a plurality of sequence fragments having at least 70% sequence identity to SEQ ID NO:1 or SEQ ID NO:2 connected through a plurality of sequence fragments having no sequence identity to SEQ ID NO:1 or SEQ ID NO:2. In embodiments, the chimeric poxvirus further includes a nucleotide insertion, deletion or mutation.

[0217] In embodiments, the nucleic acid fragments are from cowpox virus strain Brighton, raccoonpox virus strain Herman, rabbitpox virus strain Utrecht, vaccinia virus strain WR, vaccinia virus strain IHD, vaccinia virus strain Elstree, vaccinia virus strain CL, vaccinia virus strain Lederle-Chorioallantoic and vaccinia virus strain AS.

[0218] In embodiments, the chimeric poxvirus is an oncolytic virus. An oncolytic virus, as used herein is a virus capable of targeting and eliminating cancer cells. In embodiments, the oncolytic virus targets lung cancer cells. In embodiments, the oncolytic virus targets ovarian cancer cells. In embodiments, the oncolytic virus targets pancreatic cancer cells. In embodiments, the oncolytic virus preferentially targets cancer cells relative to non-cancer cells.

[0219] In embodiments, the poxvirus includes a miRNA binding sequence. In embodiments, the poxvirus includes a plurality of miRNA binding sequences. In embodiments, the plurality of miRNA binding sequences are independently different. In embodiments, the plurality of miRNA binding sequences are the same. In embodiments, the miRNA binding sequence is about 22 nucleotides in length. In embodiments, the miRNA binding sequence is at least 22 nucleotides in length. In embodiments, the miRNA binding sequence is 22 nucleotides in length. In embodiments, the miRNA binding sequence is about 22 nucleotides in length. In embodiments, each of the plurality of miRNA binding sequences is at least 22 nucleotides in length. In embodiments, each of the plurality of miRNA binding sequences is about 22 nucleotides in length. In embodiments, each of the plurality of miRNA binding sequences is 22 nucleotides in length.

[0220] In an aspect, provided is an isolated nucleic acid encoding a chimeric poxvirus as described herein. In embodiments, the isolated nucleic acid is SEQ ID NO:1. In embodiments, the isolated nucleic acid is SEQ ID NO:2.

### Chimeric Poxviruses Including Transgenes

[0221] The chimeric poxviruses as described herein may include transgenes. As used herein, a “transgene” refers to a nucleic acid sequence that originates from outside a given cell, organism or virus. A transgene as provided herein is therefore not native to, or originates within a poxvirus. A transgene as provided may encode a protein or may be a non-coding nucleic acid sequence. Transgenes provided herein may include anti-cancer nucleic acid sequences (e.g., nucleic acid binding sequences and nucleic acid sequences that encode for polypeptides useful for the treatment of cancer) or detectable moiety-encoding nucleic acid sequences. Thus, in embodiments, the chimeric poxvirus described herein includes one or more anti-cancer nucleic acid sequences or a detectable moiety-encoding nucleic acid sequence. In embodiments, the chimeric poxvirus described herein includes one or more anti-cancer nucleic acid sequences and a detectable moiety-encoding nucleic acid sequence.

[0222] The chimeric poxviruses provided herein including embodiments thereof may include transgenes. The transgenes included in the chimeric poxvirus provided herein may increase the oncolytic activity of the chimeric poxvirus compared to a chimeric poxvirus lacking said transgene. The transgenes may further increase the capability of the chimeric poxvirus to differentially express/replicate in cancer cells relative to healthy (non-cancer) cells. Where the chimeric poxvirus includes transgenes, the nucleic acid of the chimeric poxvirus includes an anti-cancer nucleic acid sequence, a nucleic acid binding sequence, a detectable moiety-encoding nucleic acid sequence or any combination thereof. Thus, in an aspect is provided a chimeric poxvirus including a nucleic acid sequence having a sequence identity of at least 70% to SEQ ID NO:1 or SEQ ID NO:2, wherein the nucleic acid sequence includes: (i) nucleic acid fragments from at least two poxvirus strains selected from the group consisting of cowpox virus strain Brighton, raccoonpox virus strain Herman, rabbitpox virus strain Utrecht, vaccinia virus strain WR, vaccinia virus strain IHD, vaccinia virus strain Elstree, vaccinia virus strain CL, vaccinia virus strain Lederle-Chorioallantoic, vaccinia virus strain AS, orf virus strain NZ2 and pseudocowpox virus strain TJS; (ii) one or more anti-cancer nucleic acid sequences; or (iii) a detectable moiety-encoding nucleic acid sequence.

[0223] As used herein, the terms “anti-cancer nucleic acid sequence” or “anti-cancer nucleic acid sequences” refer to nucleic acid sequences having antineoplastic properties and/or the ability to inhibit the growth or proliferation of a cancer cell and/or provide for selective expression of the chimeric poxvirus provided herein including embodiments thereof in a cancer cell relative to a healthy cell. Anti-cancer nucleic acid sequences may inhibit the progression or slow the progression of cancer temporarily or permanently. Examples of anti-cancer nucleic acid sequences include sequences encoding proteins the expression of which directly or indirectly inhibits cancer cell growth. For example, an anti-cancer nucleic acid sequence as provided herein may encode a protein, which is expressed at a higher level in a cancer cell relative to a healthy cell (e.g., sodium iodide transporter)). In another non-limiting example, an anti-cancer nucleic acid sequence may encode a polypeptide (antibody) capable of de-repressing anti-tumor immune responses (e.g., anti-PD-L1 antibodies or fragments thereof). In embodiments, the anti-cancer nucleic acid sequence includes a nucleic acid sequence capable of increasing expression/replication of a chimeric poxvirus in a cancer cell relative to a healthy cell. Thus, in embodiments, the expression (e.g., transcription, translation) rate of a chimeric poxvirus including the anti-cancer nucleic acid sequence is decreased in a healthy cell relative to a cancer cell. In embodiments, the chimeric poxvirus including the anti-cancer nucleic acid sequence is not expressed at a detectable amount in a healthy cell. In embodiments, the anti-cancer nucleic acid sequence is a nucleic acid binding sequence. In embodiments, the anti-cancer nucleic acid sequence includes a nucleic acid binding sequence.

[0224] As used herein, a “nucleic acid binding sequence” refers to a nucleic acid sequence capable of binding (hybridizing) to an at least partially complementary cellular nucleic acid (e.g., DNA, RNA, miRNA), wherein the cellular nucleic acid is present at an increased amount in a healthy cell relative to a cancer cell. The nucleic acid binding sequence provided herein may form part of the nucleic acid comprised by the chimeric poxvirus and may be operably linked to a gene of the chimeric poxvirus. Upon binding of the cellular nucleic acid to the nucleic acid binding sequence the chimeric poxvirus gene may be targeted for degradation (hydrolysis), thereby decreasing expression/replication of the chimeric poxvirus. In embodiments, the nucleic acid binding sequence is a DNA binding sequence. In embodiments, the nucleic acid binding sequence is a RNA binding sequence. In embodiments, the nucleic acid binding sequence is a miRNA binding sequence. Therefore, in embodiments, the anti-cancer nucleic acid sequence is a nucleic acid binding sequence. In embodiments, the anti-cancer nucleic acid sequence is a DNA binding sequence. In embodiments, the anti-cancer nucleic acid sequence is a RNA binding sequence. In embodiments, the anti-cancer nucleic acid sequence is a miRNA binding sequence.

[0225] A “detectable moiety-encoding nucleic acid sequence” as used herein refers to a nucleic acid sequence that encodes a composition detectable by spectroscopic, photochemical, biochemical, immunochemical, chemical, or other physical means. Detectable moiety-encoding nucleic acid sequences may encode a fluorescent moiety. Non-limiting examples of fluorescent moieties are mCherry, Emerald, and firefly luciferase.

[0226] Anti-cancer nucleic acid sequences (transgenes) may form part of the genome of the chimeric poxvirus provided herein including embodiments thereof. The chimeric poxvirus genome contains genes required for poxvirus expression and replication. Genes that are required for chimeric poxvirus expression and replication are referred to herein as “essential genes.” Genes that are not required for expression and replication of the chimeric poxvirus are referred to herein as “non-essential genes.” Anti-cancer nucleic acid sequences may be incorporated into the chimeric poxvirus genome through insertion into genes or may be operably linked to genes. Upon insertion of the anti-cancer nucleic acid sequence into a chimeric poxvirus gene, the gene (e.g., non-essential gene) or portions thereof may be deleted. In embodiments, the one or more anti-cancer nucleic acid sequences form part of a non-essential gene of the chimeric poxvirus. In embodiments, the one or more anti-cancer nucleic acid sequences are inserted into a non-essential gene of the chimeric poxvirus. In embodiments, the non-essential gene is a thymidine kinase gene. In embodiments, the non-essential gene is a J2R gene. In embodiments, the non-essential gene is a F14.5L gene.

[0227] As discussed above, anti-cancer nucleic acid sequences may encode polypeptides useful for the treatment of cancer. In embodiments, the one or more anti-cancer nucleic acid sequences independently encode a PD-L1 inhibitor or a sodium iodide symporter. In embodiments, the PD-L1 inhibitor is an anti-PD-L1 scFv. In embodiments, the anti-PD-L1 scFv includes the sequence of SEQ ID NO:17. In embodiments, the anti-PD-L1 scFv is the sequence of SEQ ID NO:17. In embodiments, the sodium iodide symporter includes the sequence of SEQ ID NO:13. In embodiments, the sodium iodide symporter is the sequence of SEQ ID NO:13.

[0228] The terms “sodium iodide symporter”, “NIS”, or “NNIS” as referred to herein include any of the recombinant or naturally-occurring forms of the sodium iodide symporter or variants or homologs thereof that maintain sodium iodide symporter activity (e.g. within at least 50%, 80%, 90%, 95%, 96%, 97%, 98%, 99% or 100% activity compared to sodium iodide symporter). In some aspects, the variants or homologs have at least 90%, 95%, 96%, 97%, 98%, 99% or 100% amino acid sequence identity across the whole sequence or a portion of the sequence (e.g. a 50, 100, 150 or 200 continuous amino acid portion) compared to a naturally occurring sodium iodide symporter. In embodiments, the sodium iodide symporter is substantially identical to the protein identified by the UniProt reference number Q92911 or a variant or homolog having substantial identity thereto. In embodiments, the sodium iodide symporter includes the sequence of SEQ ID NO:13. In embodiments, the sodium iodide symporter is the sequence of SEQ ID NO:13.

[0229] Expression of the anti-cancer nucleic acid sequence provided herein may be controlled by a promoter. Therefore, in embodiments, the one or more anti-cancer nucleic acid sequences are each operably linked to a promoter. In embodiments, the promoter is a vaccinia virus early promoter. In embodiments, the promoter is a synthetic early promoter. In embodiments, the synthetic early promoter includes the sequence of SEQ ID NO:19. In embodiments, the synthetic early promoter is the sequence of SEQ ID NO:19. In embodiments, the promoter is a vaccinia virus late promoter. In embodiments, the promoter is a H5 promoter or an 11K promoter. In embodiments, the H5 promoter includes the sequence of SEQ ID NO:18. In embodiments, the H5 promoter is the sequence of SEQ ID NO:18. In embodiments, the 11K promoter includes the sequence of SEQ ID NO:20. In embodiments, the 11K promoter is the sequence of SEQ ID NO:20.

[0230] The anti-cancer nucleic acid sequence (nucleic acid binding sequence) provided herein may be incorporated into the chimeric poxvirus genome such that it is placed into functional relationship (operably linked) with a specific poxvirus gene. For example, the anti-cancer nucleic acid sequence (nucleic acid binding sequence) may be operably linked to a poxvirus gene if it affects the transcription or translation of the poxvirus gene. Generally, the anti-cancer nucleic acid sequence (nucleic acid binding sequence) and the poxvirus gene are operably linked when they are contiguous and/or in reading phase. In embodiments, the one or more anti-cancer nucleic acid sequences (one or more nucleic acid binding sequences) are operably linked to an essential gene of the chimeric poxvirus. In embodiments, the one or more anti-cancer nucleic acid sequences (one or more nucleic acid binding sequences) are operably linked to a DNA polymerase gene of the chimeric poxvirus. In embodiments, the one or more anti-cancer nucleic acid sequences (one or more nucleic acid binding sequences) are operably linked to the 3′ end of a DNA polymerase gene of the chimeric poxvirus. In embodiments, the one or more anti-cancer nucleic acid sequences (one or more nucleic acid binding sequences) are operably linked to a uracil DNA glycosylase gene. In embodiments, the one or more anti-cancer nucleic acid sequences (one or more nucleic acid binding sequences) are operably linked to the 3′end of a uracil DNA glycosylase gene.

[0231] In embodiments, the one or more anti-cancer nucleic acid sequences (one or more nucleic acid binding sequences) independently encode for a miRNA binding sequence. In embodiments, the miRNA binding sequence is a miR100 binding sequence or a let7c binding sequence. In embodiments, the miRNA binding sequence is a miR100 binding sequence. In embodiments, the miR100 binding sequence includes the sequence of SEQ ID NO:9. In embodiments, the miR100 binding sequence is the sequence of SEQ ID NO:9. In embodiments, the miR100 binding sequence includes the sequence of SEQ ID NO:10. In embodiments, the miR100 binding sequence is the sequence of SEQ ID NO:10. In embodiments, the miRNA binding sequence is a let7c binding sequence. In embodiments, the let7c binding sequence includes the sequence of SEQ ID NO:11. In embodiments, the let7c binding sequence is the sequence of SEQ ID NO:11.

[0232] In embodiments, the one or more anti-cancer nucleic acid sequences are a first anti-cancer nucleic acid sequence and a second anti-cancer nucleic acid sequence. As provided herein the first anti-cancer nucleic acid sequence may be a first nucleic acid binding sequence and the second anti-cancer nucleic acid sequence may be a second nucleic acid binding sequence.

[0233] In embodiments, the first anti-cancer nucleic acid sequence encodes a sodium iodide symporter and said second anti-cancer nucleic acid sequence (second nucleic acid binding sequence) encodes a miRNA binding sequence. In embodiments, the first anti-cancer nucleic acid sequence forms part of a thymidine kinase gene and the second anti-cancer nucleic acid sequence (second nucleic acid binding sequence) is operably linked to a uracil DNA glycosylase gene. In embodiments, the first anti-cancer nucleic acid sequence forms part of a thymidine kinase gene and the second anti-cancer nucleic acid sequence (second nucleic acid binding sequence) is operably linked to a DNA polymerase gene.

[0234] In embodiments, the first anti-cancer nucleic acid sequence encodes a sodium iodide symporter and the second anti-cancer nucleic acid sequence encodes a PD-L1 inhibitor. In embodiments, the first anti-cancer nucleic acid sequence forms part of a thymidine kinase gene and the second anti-cancer nucleic acid sequence forms part of a F14.5L gene.

[0235] In embodiments, the nucleic acid sequence includes: (i) nucleic acid fragments from at least two poxvirus strains selected from the group consisting of cowpox virus strain Brighton, raccoonpox virus strain Herman, rabbitpox virus strain Utrecht, vaccinia virus strain WR, vaccinia virus strain IHD, vaccinia virus strain Elstree, vaccinia virus strain CL, vaccinia virus strain Lederle-Chorioallantoic, vaccinia virus strain AS, orf virus strain NZ2 and pseudocowpox virus strain TJS; and (ii) said detectable moiety-encoding nucleic acid sequence. In embodiments, the detectable moiety-encoding nucleic acid sequence encodes a fluorescent moiety. In embodiments, the detectable moiety-encoding nucleic acid sequence forms part of a non-essential gene of the chimeric poxvirus. In embodiments, the non-essential gene is a thymidine kinase gene. In embodiments, the parts of the non-essential gene are deleted.

[0236] In embodiments, the detectable moiety-encoding nucleic acid sequence is operably linked to a promoter. In embodiments, the promoter is a vaccinia virus early promoter. In embodiments, the promoter is a synthetic early promoter. In embodiments, the synthetic early promoter includes the sequence of SEQ ID NO:19. In embodiments, the synthetic early promoter is the sequence of SEQ ID NO:19. In embodiments, the promoter is a vaccinia virus late promoter. In embodiments, the promoter is a H5 promoter or an 11K promoter. In embodiments, the H5 promoter includes the sequence of SEQ ID NO:18. In embodiments, the H5 promoter is the sequence of SEQ ID NO:18. In embodiments, the 11K promoter includes the sequence of SEQ ID NO:20. In embodiments, the 11K promoter is the sequence of SEQ ID NO:20.

[0237] In one embodiment, the anti-cancer nucleic acid sequence (nucleic acid binding sequence) encodes a miRNA binding sequence having the sequence of SEQ ID NO:10 and is operably linked to the 3′ end of a uracil DNA glycosylase gene.

[0238] In one embodiment, the anti-cancer nucleic acid sequence (nucleic acid binding sequence) encodes a miRNA binding sequence having the sequence of SEQ ID NO:9 and is operably linked to the 3′ end of a uracil DNA glycosylase gene.

[0239] In one embodiment, the anti-cancer nucleic acid sequence (nucleic acid binding sequence) encodes a miRNA binding sequence having the sequence of SEQ ID NO:11 and is operably linked to the 3′ end of a uracil DNA glycosylase gene.

[0240] In one embodiment, the anti-cancer nucleic acid sequence (nucleic acid binding sequence) encodes a miRNA binding sequence having the sequence of SEQ ID NO:9 and is operably linked to the 3′ end of a DNA polymerase gene.

[0241] In one embodiment, the anti-cancer nucleic acid sequence (nucleic acid binding sequence) encodes a miRNA binding sequence having the sequence of SEQ ID NO:11 and is operably linked to the 3′ end of a DNA polymerase gene.

[0242] In one embodiment, the thymidine kinase gene of the chimeric poxvirus has the sequence of SEQ ID NO:5.

[0243] In one embodiment, the anti-cancer nucleic acid sequence encodes a sodium iodide symporter, is operably linked to a synthetic early promoter, and forms part of a thymidine kinase gene, wherein the sodium iodide symporter has the sequence of SEQ ID NO:13 and the synthetic early promoter has the sequence of SEQ ID NO:19.

[0244] In one embodiment, the detectable moiety-encoding nucleic acid sequence encodes a fluorescent moiety having the sequence of SEQ ID NO:14, is operably linked to a H5 promoter, and forms part of a thymidine kinase gene, wherein the H5 promoter has the sequence of SEQ ID NO:18.

[0245] In one embodiment, the detectable moiety-encoding nucleic acid sequence encodes a fluorescent moiety having the sequence of SEQ ID NO:15, is operably linked to a synthetic early promoter, and forms part of a thymidine kinase gene, wherein the synthetic early promoter has the sequence of SEQ ID NO:19.

[0246] In one embodiment, the detectable moiety-encoding nucleic acid sequence encodes a fluorescent moiety having the sequence of SEQ ID NO:15, is operably linked to a H5 promoter, and forms part of a thymidine kinase gene, wherein the H5 promoter has the sequence of SEQ ID NO:18.

[0247] In one embodiment, the detectable moiety-encoding nucleic acid sequence encodes a fluorescent moiety having the sequence of SEQ ID NO:15, is operably linked to an 11K promoter, and forms part of a thymidine kinase gene, wherein the 11K promoter has the sequence of SEQ ID NO:20.

[0248] In one embodiment, the detectable moiety-encoding nucleic acid sequence encodes a fluorescent moiety having the sequence of SEQ ID NO:16, is operably linked to a H5 promoter, and forms part of a thymidine kinase gene, wherein the H5 promoter has the sequence of SEQ ID NO:18.

[0249] In one embodiment, the detectable moiety-encoding nucleic acid sequence encodes a fluorescent moiety having the sequence of SEQ ID NO:16, is operably linked to an 11K promoter, and forms part of a thymidine kinase gene, wherein the 11K promoter has the sequence of SEQ ID NO:20.

[0250] In one embodiment, the first anti-cancer nucleic acid sequence encodes a sodium iodide symporter, is operably linked to a synthetic early promoter, and forms part of a thymidine kinase gene; and the second anti-cancer nucleic acid sequence (nucleic acid binding sequence) encodes a miRNA binding sequence having the sequence of SEQ ID NO:10, and is operably linked to the 3′ end of a uracil DNA glycosylase gene, wherein the sodium iodide symporter has the sequence of SEQ ID NO:13 and the synthetic early promoter has the sequence of SEQ ID NO:19.

[0251] In one embodiment, the first anti-cancer nucleic acid sequence encodes a sodium iodide symporter, is operably linked to a synthetic early promoter, and forms part of a thymidine kinase gene; and the second anti-cancer nucleic acid sequence (nucleic acid binding sequence) encodes a miRNA binding sequence having the sequence of SEQ ID NO:9, and is operably linked to the 3′ end of a uracil DNA glycosylase gene, wherein the sodium iodide symporter has the sequence of SEQ ID NO:13 and the synthetic early promoter has the sequence of SEQ ID NO:19.

[0252] In one embodiment, the first anti-cancer nucleic acid sequence encodes a sodium iodide symporter, is operably linked to a synthetic early promoter, and forms part of a thymidine kinase gene; and the second anti-cancer nucleic acid sequence (nucleic acid binding sequence) encodes a miRNA binding sequence having the sequence of SEQ ID NO:11, and is operably linked to the 3′ end of a uracil DNA glycosylase gene, wherein the sodium iodide symporter has the sequence of SEQ ID NO:13 and the synthetic early promoter has the sequence of SEQ ID NO:19.

[0253] In one embodiment, the first anti-cancer nucleic acid sequence encodes a sodium iodide symporter, is operably linked to a synthetic early promoter, and forms part of a thymidine kinase gene; and the second anti-cancer nucleic acid sequence (nucleic acid binding sequence) encodes a miRNA binding sequence having the sequence of SEQ ID NO:9, and is operably linked to the 3′ end of a DNA polymerase gene, wherein the sodium iodide symporter has the sequence of SEQ ID NO:13 and the synthetic early promoter has the sequence of SEQ ID NO:19.

[0254] In one embodiment, the first anti-cancer nucleic acid sequence encodes a sodium iodide symporter, is operably linked to a synthetic early promoter, and forms part of a thymidine kinase gene; and the second anti-cancer nucleic acid sequence (nucleic acid binding sequence) encodes a miRNA binding sequence having the sequence of SEQ ID NO:11, and is operably linked to the 3′ end of a DNA polymerase gene, wherein the sodium iodide symporter has the sequence of SEQ ID NO:13 and the synthetic early promoter has the sequence of SEQ ID NO:19.

[0255] In one embodiment, the F14.5L gene of the chimeric poxvirus has the sequence of SEQ ID NO:7.

[0256] In one embodiment, the anti-cancer nucleic acid sequence encodes an anti-PD-L1 scFv, is operably linked to a H5 promoter, and forms part of a F14.5L gene, wherein the anti-PD-L1 scFv has the sequence of SEQ ID NO:17 and the H5 promoter has the sequence of SEQ ID NO:18.

[0257] In one embodiment, the anti-cancer nucleic acid sequence encodes a sodium iodide symporter, is operably linked to a synthetic early promoter, and forms part of a thymidine kinase gene, and the F14.5L gene has the sequence of SEQ ID NO:7, wherein the sodium iodide symporter has the sequence of SEQ ID NO:13 and the synthetic early promoter has the sequence of SEQ ID NO:19.

[0258] In one embodiment, the first anti-cancer nucleic acid sequence encodes a sodium iodide symporter, is operably linked to a synthetic early promoter, and forms part of a thymidine kinase gene; and the second anti-cancer nucleic acid sequence encodes an anti-PD-L1 scFv, is operably linked to a H5 promoter and forms part of a F14.5L gene, wherein the sodium iodide symporter has the sequence of SEQ ID NO:13, the synthetic early promoter has the sequence of SEQ ID NO:19, the anti-PD-L1 scFv has the sequence of SEQ ID NO:17, and the H5 promoter has the sequence of SEQ ID NO:18.

[0259] In an aspect is provided a composition including a chimeric poxvirus and a neural stem cell (NSC). In embodiments, the chimeric poxvirus forms part of the NSC. Where the chimeric poxvirus forms part of the NSC, the NSC includes the chimeric poxvirus (the genome of the chimeric poxvirus, viral particles of the chimeric poxvirus or a combination thereof). In embodiments, the poxvirus is encoded by a nucleic acid sequence having a sequence identity of at least 70% to SEQ ID NO:1. In embodiments, the nucleic acid sequence includes nucleic acid fragments from at least two poxvirus strains selected from the group consisting of cowpox virus strain Brighton, raccoonpox virus strain Herman, rabbitpox virus strain Utrecht, vaccinia virus strain WR, vaccinia virus strain IHD, vaccinia virus strain Elstree, vaccinia virus strain CL, vaccinia virus strain Lederle-Chorioallantoic, vaccinia virus strain AS, orf virus strain NZ2 and pseudocowpox virus strain TJS. In embodiments, the nucleic acid sequence includes nucleic acid fragments from cowpox virus strain Brighton, raccoonpox virus strain Herman, rabbitpox virus strain Utrecht, vaccinia virus strain WR, vaccinia virus strain IHD, vaccinia virus strain Elstree, vaccinia virus strain CL, vaccinia virus strain Lederle-Chorioallantoic and vaccinia virus strain AS.

[0260] In embodiments, the nucleic acid sequence further includes one or more anti-cancer nucleic acid sequences or a detectable moiety-encoding nucleic acid sequence. In embodiments, the chimeric poxvirus is a replication-competent chimeric poxvirus. In embodiments, the NSC is a Human Leukocyte Antigen (HLA) II-negative NSC. In embodiments, the NSC is an HB1.F3.CD21 cell.

[0261] In embodiments, the composition further includes an effective amount of a therapeutic agent. In embodiments, the therapeutic agent is an anti-cancer agent. In embodiments, the therapeutic agent is a PD-L1 inhibitor, a CTLA-4 inhibitor or an OX40 inhibitor. In embodiments, the therapeutic agent is a PD-L1 inhibitor. In embodiments, the therapeutic agent is a CTLA-4 inhibitor. In embodiments, the therapeutic agent is an OX40 inhibitor. In embodiments, the therapeutic agent is an anti-PD-L1 antibody, an anti-CTLA-4 antibody or an anti-OX40 antibody. In embodiments, the therapeutic agent is an anti-PD-L1 antibody. In embodiments, the therapeutic agent is an anti-CTLA-4 antibody. In embodiments, the therapeutic agent is an anti-OX40 antibody.

[0262] In embodiments, the composition is effective to treat cancer. In embodiments, the cancer is breast cancer, colon cancer, kidney cancer, leukemia, lung cancer, melanoma, ovarian cancer, prostate cancer, pancreatic cancer, brain cancer, liver cancer, gastric cancer or a sarcoma. In embodiments, the cancer is ovarian cancer. In embodiments, the ovarian cancer is an ovarian metastasis.

### III. Pharmaceutical Compositions

[0263] The neural stem cell including the chimeric poxvirus provided herein, including embodiments thereof, may form part of a pharmaceutical composition. Thus, in embodiments, the composition is a pharmaceutical composition. In embodiments, the pharmaceutical composition includes a pharmaceutically acceptable excipient.

[0264] The term “preparation” is intended to include the formulation of the active compound (e.g., neural stem cell including a chimeric poxvirus) with encapsulating material as a carrier providing a capsule in which the active component with or without other carriers, is surrounded by a carrier, which is thus in association with it. Similarly, cachets and lozenges are included.

[0265] Tablets, powders, capsules, pills, cachets, and lozenges can be used as solid dosage forms suitable for oral administration.

[0266] “Pharmaceutically acceptable excipient” and “pharmaceutically acceptable carrier” refer to a substance that aids the administration of an active agent to and absorption by a subject and can be included in the compositions of the present invention without causing a significant adverse toxicological effect on the patient. Non-limiting examples of pharmaceutically acceptable excipients include water, NaCl, normal saline solutions, lactated Ringer's, normal sucrose, normal glucose, binders, fillers, disintegrants, lubricants, coatings, sweeteners, flavors, salt solutions (such as Ringer's solution), alcohols, oils, gelatins, carbohydrates such as lactose, amylose or starch, fatty acid esters, hydroxymethycellulose, polyvinyl pyrrolidine, and colors, and the like. Such preparations can be sterilized and, if desired, mixed with auxiliary agents such as lubricants, preservatives, stabilizers, wetting agents, emulsifiers, salts for influencing osmotic pressure, buffers, coloring, and/or aromatic substances and the like that do not deleteriously react with the compounds of the invention. One of skill in the art will recognize that other pharmaceutical excipients are useful in the present invention.

[0267] The compositions provided herein including embodiments thereof may be adminstered orally, gastrointestinally, or rectally. Administration can be in the form of a single bolus dose, or may be, for example, by a continuous perfusion pump. In embodiments, the chimeric poxvirus provided herein is combined with one or more excipients, for example, a disintegrant, a filler, a glidant, or a preservative. In embodiments, the chimeric poxvirus provided herein forms part of a capsule. Suitable capsules include both hard shell capsules or soft-shelled capsules. Any lipid-based or polymer-based colloid may be used to form the capusule. Exemplary polymers useful for colloid preparations include gelatin, plant polysaccharides or their derivatives such as carrageenans and modified forms of starch and cellulose, e.g., hypromellose. Optionally, other ingredients may be added to the gelling agent solution, for example plasticizers such as glycerin and/or sorbitol to decrease the capsule's hardness, coloring agents, preservatives, disintegrants, lubricants and surface treatment.

[0268] The compositions can be formulated in a unit dosage form, each dosage containing, for example, from about 0.1-10×10⁶ neural stem cells including chimeric poxvirus. The term “unit dosage forms” refers to physically discrete units suitable as unitary dosages for human subjects and other mammals, each unit containing a predetermined quantity of active material calculated to produce the desired therapeutic effect, in association with a suitable pharmaceutical excipient. For preparing solid compositions such as tablets, the principal active ingredient is mixed with a pharmaceutical excipient to form a solid preformulation composition containing a homogeneous mixture of a compound of the present invention. When referring to these preformulation compositions as homogeneous, the active ingredient is typically dispersed evenly throughout the composition so that the composition can be readily subdivided into equally effective unit dosage forms such as tablets, pills and capsules.

[0269] In some embodiments, tablets or pills of the present invention can be coated or otherwise compounded to provide a dosage form affording the advantage of prolonged action. For example, the tablet or pill can comprise an inner dosage and an outer dosage component, the latter being in the form of an envelope over the former. The two components can be separated by an enteric layer which serves to resist disintegration in the stomach and permit the inner component to pass intact into the duodenum or to be delayed in release. A variety of materials can be used for such enteric layers or coatings, such materials including a number of polymeric acids and mixtures of polymeric acids with such materials as shellac, cetyl alcohol, and cellulose acetate.

[0270] The liquid forms in which the compositions of the present invention can be incorporated for administration orally or by injection include aqueous solutions, suitably flavored syrups, aqueous or oil suspensions, and flavored emulsions with edible oils such as cottonseed oil, sesame oil, coconut oil, or peanut oil, as well as elixirs and similar pharmaceutical vehicles.

### IV. Cell Compositions

[0271] In another aspect, is provided a neural stem cell (NSC) including a chimeric poxvirus. In embodiments, the poxvirus is encoded by a nucleic acid sequence having a sequence identity of at least 70% to SEQ ID NO:1. In embodiments, the nucleic acid sequence including nucleic acid fragments from at least two poxvirus strains selected from the group consisting of cowpox virus strain Brighton, raccoonpox virus strain Herman, rabbitpox virus strain Utrecht, vaccinia virus strain WR, vaccinia virus strain IHD, vaccinia virus strain Elstree, vaccinia virus strain CL, vaccinia virus strain Lederle-Chorioallantoic, vaccinia virus strain AS, orf virus strain NZ2 and pseudocowpox virus strain TJS. In embodiments, the nucleic acid sequence including nucleic acid fragments from cowpox virus strain Brighton, raccoonpox virus strain Herman, rabbitpox virus strain Utrecht, vaccinia virus strain WR, vaccinia virus strain IHD, vaccinia virus strain Elstree, vaccinia virus strain CL, vaccinia virus strain Lederle-Chorioallantoic and vaccinia virus strain AS.

[0272] In embodiments, the nucleic acid sequence further including one or more anti-cancer nucleic acid sequences or a detectable moiety-encoding nucleic acid sequence. In embodiments, the chimeric poxvirus is a replication-competent chimeric poxvirus. In embodiments, the NSC is a Human Leukocyte Antigen (HLA) II-negative NSC. In embodiments, the NSC is an HB1.F3.CD21 cell. In embodiments, the NSC forms part of a pharmaceutical composition. In embodiments, the pharmaceutical composition including a pharmaceutically acceptable excipient.

### V. Methods of Treatment

[0273] In an another aspect is provided a method of treating cancer in a subject in need thereof, the method including administering to the subject a therapeutically effective amount of a neural stem cell and a chimeric poxvirus as described herein including embodiments thereof, thereby treating cancer in the subject. In embodiments, the cancer is breast cancer, colon cancer, kidney cancer, leukemia, lung cancer, melanoma, ovarian cancer, prostate cancer, pancreatic cancer, brain cancer, liver cancer, gastric cancer or a sarcoma. In embodiments, the cancer is breast cancer. In embodiments, the cancer is colon cancer. In embodiments, the cancer is kidney cancer. In embodiments, the cancer is leukemia. In embodiments, the cancer is lung cancer. In embodiments, the cancer is melanoma. In embodiments, the cancer is ovarian cancer. In embodiments, the cancer is prostate cancer. In embodiments, the cancer is pancreatic cancer. In embodiments, the cancer is brain cancer. In embodiments, the cancer is liver cancer. In embodiments, the cancer is gastric cancer. In embodiments, the cancer is a sarcoma. In embodiments, the cancer is triple-negative breast cancer.

[0274] In embodiments, the administering includes administering a neural stem cell including a chimeric poxvirus and a therapeutic agent. In embodiments, the neural stem cell including a chimeric poxvirus and the therapeutic agent are administered at a combined synergistic amount. In embodiments, the neural stem cell including a chimeric poxvirus and the therapeutic agent are administered simultaneously. In embodiments, the neural stem cell including a chimeric poxvirus and the therapeutic agent are administered sequentially.

[0275] In embodiments, the neural stem cell is infected with at least 10³ plaque forming units (Pfu)/kg of chimeric poxvirus prior to the administering step. In embodiments, the neural stem cell is infected with at least 10⁴ plaque forming units (Pfu)/kg of chimeric poxvirus prior to the administering step. In embodiments, the neural stem cell is infected with at least 10⁵ plaque forming units (Pfu)/kg of chimeric poxvirus prior to the administering step. In embodiments, the neural stem cell is infected with at least 10⁶ plaque forming units (Pfu)/kg of chimeric poxvirus prior to the administering step. In embodiments, the neural stem cell is infected with at least 10⁷ plaque forming units (Pfu)/kg of chimeric poxvirus prior to the administering step. In embodiments, the neural stem cell is infected with at least 10⁸ plaque forming units (Pfu)/kg of chimeric poxvirus prior to the administering step.

[0276] In embodiments, the neural stem cell is infected with 10³ plaque forming units (Pfu)/kg of chimeric poxvirus prior to the administering step. In embodiments, the neural stem cell is infected with 10⁴ plaque forming units (Pfu)/kg of chimeric poxvirus prior to the administering step. In embodiments, the neural stem cell is infected with 10⁵ plaque forming units (Pfu)/kg of chimeric poxvirus prior to the administering step. In embodiments, the neural stem cell is infected with 10⁶ plaque forming units (Pfu)/kg of chimeric poxvirus prior to the administering step. In embodiments, the neural stem cell is infected with 10⁷ plaque forming units (Pfu)/kg of chimeric poxvirus prior to the administering step. In embodiments, the neural stem cell is infected with 10⁸ plaque forming units (Pfu)/kg of chimeric poxvirus prior to the administering step.

[0277] In embodiments, the neural stem cell is infected with about 10³ plaque forming units (Pfu)/kg of chimeric poxvirus prior to the administering step. In embodiments, the neural stem cell is infected with 10³ plaque forming units (Pfu)/kg of chimeric poxvirus prior to the administering step. In embodiments, the neural stem cell is infected with about 4×10⁴ plaque forming units (Pfu)/kg of chimeric poxvirus prior to the administering step. In embodiments, the neural stem cell is infected with 4×10⁴ plaque forming units (Pfu)/kg of chimeric poxvirus prior to the administering step. In embodiments, the neural stem cell is infected with about 5×10⁴ plaque forming units (Pfu)/kg of chimeric poxvirus prior to the administering step. In embodiments, the neural stem cell is infected with 5×10⁴ plaque forming units (Pfu)/kg of chimeric poxvirus prior to the administering step.

[0278] In embodiments, the neural stem cell is infected with the chimeric poxvirus prior to the administering step. In embodiments, the neural stem cell is infected with the chimeric poxvirus at a multiplicity of infection of 0.5. In embodiments, the neural stem cell is infected with the chimeric poxvirus at a multiplicity of infection of 1. In embodiments, the neural stem cell is infected with the chimeric poxvirus at a multiplicity of infection of 1.5. In embodiments, the neural stem cell is infected with the chimeric poxvirus at a multiplicity of infection of 2. In embodiments, the neural stem cell is infected with the chimeric poxvirus at a multiplicity of infection of 2.5. In embodiments, the neural stem cell is infected with the chimeric poxvirus at a multiplicity of infection of 3. In embodiments, the neural stem cell is infected with the chimeric poxvirus at a multiplicity of infection of 3.5. In embodiments, the neural stem cell is infected with the chimeric poxvirus at a multiplicity of infection of 4. In embodiments, the neural stem cell is infected with the chimeric poxvirus at a multiplicity of infection of 4.5. In embodiments, the neural stem cell is infected with the chimeric poxvirus at a multiplicity of infection of 5. In embodiments, the neural stem cell is infected with the chimeric poxvirus at a multiplicity of infection of 5.5. In embodiments, the neural stem cell is infected with the chimeric poxvirus at a multiplicity of infection of 6. Thus, the chimerci poxvirus forms part of the NSC prior to the administering step. Wherein the chimeric poxvirus forms part of the NSC, the NSC includes the chimeric poxvirus. Therefore, unless otherwise stated, where the NSC provided herein is administered it includes the chimeric poxvirus as provided herein including embodiments thereof.

[0279] In embodiments, the neural stem cell including the chimeric poxvirus is administered at a cell number of 1×10⁷ cells. In embodiments, the neural stem cell including the chimeric poxvirus is administered at a cell number of 2×10⁷ cells. In embodiments, the neural stem cell including the chimeric poxvirus is administered at a cell number of 3×10⁷ cells. In embodiments, the neural stem cell including the chimeric poxvirus is administered at a cell number of 4×10⁷ cells. In embodiments, the neural stem cell including the chimeric poxvirus is administered at a cell number of 5×10⁷ cells. In embodiments, the neural stem cell including the chimeric poxvirus is administered at a cell number of 6×10⁷ cells. In embodiments, the neural stem cell including the chimeric poxvirus is administered at a cell number of 7×10⁷ cells. In embodiments, the neural stem cell including the chimeric poxvirus is administered at a cell number of 8×10⁷ cells. In embodiments, the neural stem cell including the chimeric poxvirus is administered at a cell number of 9×10⁷ cells. In embodiments, the neural stem cell including the chimeric poxvirus is administered at a cell number of 1×10⁸ cells. In embodiments, the neural stem cell including the chimeric poxvirus is administered at a cell number of 1.5×10⁸ cells. In embodiments, the neural stem cell including the chimeric poxvirus is administered at a cell number of 1.8×10⁸ cells. In embodiments, the neural stem cell including the chimeric poxvirus is administered at a cell number of 2×10⁸ cells. In embodiments, the neural stem cell including the chimeric poxvirus is administered at a cell number of 2.5×10⁸ cells. In embodiments, the neural stem cell including the chimeric poxvirus is administered at a cell number of 3×10⁸ cells. In embodiments, the neural stem cell including the chimeric poxvirus is administered at a cell number of 3.5×10⁸ cells. In embodiments, the neural stem cell including the chimeric poxvirus is administered at a cell number of 4×10⁸ cells. In embodiments, the neural stem cell including the chimeric poxvirus is administered at a cell number of 4.5×10⁸ cells. In embodiments, the neural stem cell including the chimeric poxvirus is administered at a cell number of 5×10⁸ cells.

[0280] In embodiments, the neural stem cell is administered at a cell number of 1×10⁷ cells. In embodiments, the neural stem cell is administered at a cell number of 2×10⁷ cells. In embodiments, the neural stem cell is administered at a cell number of 3×10⁷ cells. In embodiments, the neural stem cell is administered at a cell number of 4×10⁷ cells. In embodiments, the neural stem cell is administered at a cell number of 5×10⁷ cells. In embodiments, the neural stem cell is administered at a cell number of 6×10⁷ cells. In embodiments, the neural stem cell is administered at a cell number of 7×10⁷ cells. In embodiments, the neural stem cell is administered at a cell number of 8×10⁷ cells. In embodiments, the neural stem cell is administered at a cell number of 9×10⁷ cells. In embodiments, the neural stem cell is administered at a cell number of 1×10⁸ cells. In embodiments, the neural stem cell is administered at a cell number of 1.5×10⁸ cells. In embodiments, the neural stem cell is administered at a cell number of 1.8×10⁸ cells. In embodiments, the neural stem cell is administered at a cell number of 2×10⁸ cells. In embodiments, the neural stem cell is administered at a cell number of 2.5×10⁸ cells. In embodiments, the neural stem cell is administered at a cell number of 3×10⁸ cells. In embodiments, the neural stem cell is administered at a cell number of 3.5×10⁸ cells. In embodiments, the neural stem cell is administered at a cell number of 4×10⁸ cells. In embodiments, the neural stem cell is administered at a cell number of 4.5×10⁸ cells. In embodiments, the neural stem cell is administered at a cell number of 5×10⁸ cells.

[0281] In embodiments, the neural stem cell including the chimeric poxvirus is administered at a cell number of 1×10⁷ to 1×10⁸ cells. In embodiments, the neural stem cell including the chimeric poxvirus is administered at a cell number of 1.5×10⁷ to 1×10⁸ cells. In embodiments, the neural stem cell including the chimeric poxvirus is administered at a cell number of 2×10⁷ to 1×10⁸ cells. In embodiments, the neural stem cell including the chimeric poxvirus is administered at a cell number of 2.5×10⁷ to 1×10⁸ cells. In embodiments, the neural stem cell including the chimeric poxvirus is administered at a cell number of 3×10⁷ to 1×10⁸ cells. In embodiments, the neural stem cell including the chimeric poxvirus is administered at a cell number of 3.5×10⁷ to 1×10⁸ cells. In embodiments, the neural stem cell including the chimeric poxvirus is administered at a cell number of 4×10⁷ to 1×10⁸ cells. In embodiments, the neural stem cell including the chimeric poxvirus is administered at a cell number of 4.5×10⁷ to 1×10⁸ cells. In embodiments, the neural stem cell including the chimeric poxvirus is administered at a cell number of 5×10⁷ to 1×10⁸ cells. In embodiments, the neural stem cell including the chimeric poxvirus is administered at a cell number of 5.5×10⁷ to 1×10⁸ cells. In embodiments, the neural stem cell including the chimeric poxvirus is administered at a cell number of 6×10⁷ to 1×10⁸ cells. In embodiments, the neural stem cell including the chimeric poxvirus is administered at a cell number of 6.5×10⁷ to 1×10⁸ cells. In embodiments, the neural stem cell including the chimeric poxvirus is administered at a cell number of 7×10⁷ to 1×10⁸ cells. In embodiments, the neural stem cell including the chimeric poxvirus is administered at a cell number of 7.5×10⁷ to 1×10⁸ cells. In embodiments, the neural stem cell including the chimeric poxvirus is administered at a cell number of 8×10⁷ to 1×10⁸ cells. In embodiments, the neural stem cell including the chimeric poxvirus is administered at a cell number of 8.5×10⁷ to 1×10⁸ cells. In embodiments, the neural stem cell including the chimeric poxvirus is administered at a cell number of 9×10⁷ to 1×10⁸ cells. In embodiments, the neural stem cell including the chimeric poxvirus is administered at a cell number of 9.5×10⁷ to 1×10⁸ cells.

[0282] In embodiments, the neural stem cell is administered at a cell number of 1×10⁷ to 1×10⁸ cells. In embodiments, the neural stem cell is administered at a cell number of 1.5×10⁷ to 1×10⁸ cells. In embodiments, the neural stem cell is administered at a cell number of 2×10⁷ to 1×10⁸ cells. In embodiments, the neural stem cell is administered at a cell number of 2.5×10⁷ to 1×10⁸ cells. In embodiments, the neural stem cell is administered at a cell number of 3×10⁷ to 1×10⁸ cells. In embodiments, the neural stem cell is administered at a cell number of 3.5×10⁷ to 1×10⁸ cells. In embodiments, the neural stem cell is administered at a cell number of 4×10⁷ to 1×10⁸ cells. In embodiments, the neural stem cell is administered at a cell number of 4.5×10⁷ to 1×10⁸ cells. In embodiments, the neural stem cell is administered at a cell number of 5×10⁷ to 1×10⁸ cells. In embodiments, the neural stem cell is administered at a cell number of 5.5×10⁷ to 1×10⁸ cells. In embodiments, the neural stem cell is administered at a cell number of 6×10⁷ to 1×10⁸ cells. In embodiments, the neural stem cell is administered at a cell number of 6.5×10⁷ to 1×10⁸ cells. In embodiments, the neural stem cell is administered at a cell number of 7×10⁷ to 1×10⁸ cells. In embodiments, the neural stem cell is administered at a cell number of 7.5×10⁷ to 1×10⁸ cells. In embodiments, the neural stem cell is administered at a cell number of 8×10⁷ to 1×10⁸ cells. In embodiments, the neural stem cell is administered at a cell number of 8.5×10⁷ to 1×10⁸ cells. In embodiments, the neural stem cell is administered at a cell number of 9×10⁷ to 1×10⁸ cells. In embodiments, the neural stem cell is administered at a cell number of 9.5×10⁷ to 1×10⁸ cells.

[0283] In embodiments, the neural stem cell including the chimeric poxvirus is administered at a cell number of 5.6×10⁶ cells/ml. In embodiments, the neural stem cell including the chimeric poxvirus is administered at a cell number of 1.1×10⁷ cells/ml. In embodiments, the neural stem cell including the chimeric poxvirus is administered at a cell number of 1.7×10⁷ cells/ml. In embodiments, the neural stem cell including the chimeric poxvirus is administered at a cell number of 3.3×10⁷ cells/ml. In embodiments, the neural stem cell including the chimeric poxvirus is administered at a cell number of 5×10⁷ cells/ml. In embodiments, the neural stem cell including the chimeric poxvirus is administered at a cell number of 5×10⁶ cells/ml. In embodiments, the neural stem cell including the chimeric poxvirus is administered at a cell number of 6×10⁶ cells/ml. In embodiments, the neural stem cell including the chimeric poxvirus is administered at a cell number of 7×10⁶ cells/ml. In embodiments, the neural stem cell including the chimeric poxvirus is administered at a cell number of 8×10⁶ cells/ml. In embodiments, the neural stem cell including the chimeric poxvirus is administered at a cell number of 9×10⁶ cells/ml. In embodiments, the neural stem cell including the chimeric poxvirus is administered at a cell number of 1×10⁷ cells/ml. In embodiments, the neural stem cell including the chimeric poxvirus is administered at a cell number of 2×10⁷ cells/ml. In embodiments, the neural stem cell including the chimeric poxvirus is administered at a cell number of 3×10⁷ cells/ml. In embodiments, the neural stem cell including the chimeric poxvirus is administered at a cell number of 4×10⁷ cells/ml. In embodiments, the neural stem cell including the chimeric poxvirus is administered at a cell number of 5×10⁷ cells/ml. In embodiments, the neural stem cell including the chimeric poxvirus is administered at a cell number of 6×10⁷ cells/ml. In embodiments, the neural stem cell including the chimeric poxvirus is administered at a cell number of 7×10⁷ cells/ml. In embodiments, the neural stem cell including the chimeric poxvirus is administered at a cell number of 8×10⁷ cells/ml. In embodiments, the neural stem cell including the chimeric poxvirus is administered at a cell number of 9×10⁷ cells/ml. In embodiments, the neural stem cell including the chimeric poxvirus is administered at a cell number of 1×10⁸ cells/ml.

[0284] In embodiments, the neural stem cell including the chimeric poxvirus is administered at a cell number of 1×10⁶ to 1×10⁸ cells/ml. In embodiments, the neural stem cell including the chimeric poxvirus is administered at a cell number of 2×10⁶ to 1×10⁸ cells/ml. In embodiments, the neural stem cell including the chimeric poxvirus is administered at a cell number of 3×10⁶ to 1×10⁸ cells/ml. In embodiments, the neural stem cell including the chimeric poxvirus is administered at a cell number of 4×10⁶ to 1×10⁸ cells/ml. In embodiments, the neural stem cell including the chimeric poxvirus is administered at a cell number of 5×10⁶ to 1×10⁸ cells/ml. In embodiments, the neural stem cell including the chimeric poxvirus is administered at a cell number of 6×10⁶ to 1×10⁸ cells/ml. In embodiments, the neural stem cell including the chimeric poxvirus is administered at a cell number of 7×10⁶ to 1×10⁸ cells/ml. In embodiments, the neural stem cell including the chimeric poxvirus is administered at a cell number of 8×10⁶ to 1×10⁸ cells/ml. In embodiments, the neural stem cell including the chimeric poxvirus is administered at a cell number of 9×10⁶ to 1×10⁸ cells/ml. In embodiments, the neural stem cell including the chimeric poxvirus is administered at a cell number of 1×10⁷ to 1×10⁸ cells/ml.

[0285] In embodiments, the neural stem cell including the chimeric poxvirus is administered at a cell number of 2×10⁷ to 1×10⁸ cells/ml. In embodiments, the neural stem cell including the chimeric poxvirus is administered at a cell number of 3×10⁷ to 1×10⁸ cells/ml. In embodiments, the neural stem cell including the chimeric poxvirus is administered at a cell number of 4×10⁷ to 1×10⁸ cells/ml. In embodiments, the neural stem cell including the chimeric poxvirus is administered at a cell number of 5×10⁷ to 1×10⁸ cells/ml. In embodiments, the neural stem cell including the chimeric poxvirus is administered at a cell number of 6×10⁷ to 1×10⁸ cells/ml. In embodiments, the neural stem cell including the chimeric poxvirus is administered at a cell number of 7×10⁷ to 1×10⁸ cells/ml. In embodiments, the neural stem cell including the chimeric poxvirus is administered at a cell number of 8×10⁷ to 1×10⁸ cells/ml. In embodiments, the neural stem cell including the chimeric poxvirus is administered at a cell number of 9×10⁷ to 1×10⁸ cells/ml.

[0286] In embodiments, the neural stem cell including the chimeric poxvirus is administered at a cell number of 0.1×10⁶ to 20×10⁶ cells. In embodiments, the neural stem cell including the chimeric poxvirus is administered at a cell number of 0.1×10⁶. In embodiments, the neural stem cell including the chimeric poxvirus is administered at a cell number of 0.5×10⁶. In embodiments, the neural stem cell including the chimeric poxvirus is administered at a cell number of 1×10⁶. In embodiments, the neural stem cell including the chimeric poxvirus is administered at a cell number of 2×10⁶. In embodiments, the neural stem cell including the chimeric poxvirus is administered at a cell number of 3×10⁶. In embodiments, the neural stem cell including the chimeric poxvirus is administered at a cell number of 4×10⁶. In embodiments, the neural stem cell including the chimeric poxvirus is administered at a cell number of 5×10⁶. In embodiments, the neural stem cell including the chimeric poxvirus is administered at a cell number of 6×10⁶. In embodiments, the neural stem cell including the chimeric poxvirus is administered at a cell number of 7×10⁶. In embodiments, the neural stem cell including the chimeric poxvirus is administered at a cell number of 8×10⁶. In embodiments, the neural stem cell including the chimeric poxvirus is administered at a cell number of 9×10⁶. In embodiments, the neural stem cell including the chimeric poxvirus is administered at a cell number of 10×10⁶. In embodiments, the neural stem cell including the chimeric poxvirus is administered at a cell number of 11×10⁶. In embodiments, the neural stem cell including the chimeric poxvirus is administered at a cell number of 12×10⁶. In embodiments, the neural stem cell including the chimeric poxvirus is administered at a cell number of 13×10⁶. In embodiments, the neural stem cell including the chimeric poxvirus is administered at a cell number of 14×10⁶. In embodiments, the neural stem cell including the chimeric poxvirus is administered at a cell number of 15×10⁶. In embodiments, the neural stem cell including the chimeric poxvirus is administered at a cell number of 16×10⁶. In embodiments, the neural stem cell including the chimeric poxvirus is administered at a cell number of 17×10⁶. In embodiments, the neural stem cell including the chimeric poxvirus is administered at a cell number of 18×10⁶. In embodiments, the neural stem cell including the chimeric poxvirus is administered at a cell number of 19×10⁶. In embodiments, the neural stem cell including the chimeric poxvirus is administered at a cell number of 20×10⁶.

[0287] According to the methods provided herein, the subject is administered an effective amount of one or more of the agents provided herein. The terms effective amount and effective dosage are used interchangeably. The term effective amount is defined as any amount necessary to produce a desired physiologic response (e.g., treat cancer). Effective amounts and schedules for administering the agent may be determined empirically by one skilled in the art. The dosage ranges for administration are those large enough to produce the desired effect in which one or more symptoms of the disease or disorder are affected (e.g., reduced or delayed). The dosage should not be so large as to cause substantial adverse side effects, such as unwanted cross-reactions, anaphylactic reactions, and the like. Generally, the dosage will vary with the age, condition, sex, type of disease, the extent of the disease or disorder, route of administration, or whether other drugs are included in the regimen, and can be determined by one of skill in the art. The dosage can be adjusted by the individual physician in the event of any contraindications. Dosages can vary and can be administered in one or more dose administrations daily, for one or several days. Guidance can be found in the literature for appropriate dosages for given classes of pharmaceutical products. For example, for the given parameter, an effective amount will show an increase or decrease of at least 5%, 10%, 15%, 20%, 25%, 40%, 50%, 60%, 75%, 80%, 90%, or at least 100%. Efficacy can also be expressed as “-fold” increase or decrease. For example, a therapeutically effective amount can have at least a 1.2-fold, 1.5-fold, 2-fold, 5-fold, or more effect over a control. The exact dose and formulation will depend on the purpose of the treatment, and will be ascertainable by one skilled in the art using known techniques (see, e.g., Lieberman, Pharmaceutical Dosage Forms (vols. 1-3, 1992); Lloyd, The Art, Science and Technology of Pharmaceutical Compounding (1999); Remington: The Science and Practice of Pharmacy, 20th Edition, Gennaro, Editor (2003), and Pickar, Dosage Calculations (1999)).

[0288] For prophylactic use, a therapeutically effective amount of the neural stem cell including the chimeric poxvirus described herein is administered to a subject prior to or during early onset (e.g., upon initial signs and symptoms of cancer). Therapeutic treatment involves administering to a subject a therapeutically effective amount of the agents described herein after diagnosis or development of disease. Thus, in another aspect, a method of treating a disease (e.g., cancer) in a subject in need thereof is provided.

[0289] The terms “subject,” “patient,” “individual,” etc. are not intended to be limiting and can be generally interchanged. That is, an individual described as a “patient” does not necessarily have a given disease, but may be merely seeking medical advice.

[0290] As used herein, “treating” or “treatment of” a condition, disease or disorder or symptoms associated with a condition, disease or disorder refers to an approach for obtaining beneficial or desired results, including clinical results. Beneficial or desired clinical results can include, but are not limited to, alleviation or amelioration of one or more symptoms or conditions, diminishment of extent of condition, disorder or disease, stabilization of the state of condition, disorder or disease, prevention of development of condition, disorder or disease, prevention of spread of condition, disorder or disease, delay or slowing of condition, disorder or disease progression, delay or slowing of condition, disorder or disease onset, amelioration or palliation of the condition, disorder or disease state, and remission, whether partial or total. “Treating” can also mean prolonging survival of a subject beyond that expected in the absence of treatment. “Treating” can also mean inhibiting the progression of the condition, disorder or disease, slowing the progression of the condition, disorder or disease temporarily, although in some instances, it involves halting the progression of the condition, disorder or disease permanently. As used herein the terms treatment, treat, or treating refers to a method of reducing the effects of one or more symptoms of a disease or condition characterized by expression of the protease or symptom of the disease or condition characterized by expression of the protease. Thus in the disclosed method, treatment can refer to a 10%, 20%, 30%, 40%, 50%, 60%, 70%, 80%, 90%, or 100% reduction in the severity of an established disease, condition, or symptom of the disease or condition (e.g., cancer). For example, a method for treating a disease is considered to be a treatment if there is a 10% reduction in one or more symptoms of the disease in a subject as compared to a control. Thus the reduction can be a 10%, 20%, 30%, 40%, 50%, 60%, 70%, 80%, 90%, 100%, or any percent reduction in between 10% and 100% as compared to native or control levels. It is understood that treatment does not necessarily refer to a cure or complete ablation of the disease, condition, or symptoms of the disease or condition. Further, as used herein, references to decreasing, reducing, or inhibiting include a change of 10%, 20%, 30%, 40%, 50%, 60%, 70%, 80%, 90% or greater as compared to a control level and such terms can include but do not necessarily include complete elimination.

[0291] Regardless of how the chimeric poxvirus compositions are formulated, the dosage required will depend on the route of administration, the nature of the formulation, the nature of the subject's condition, e.g., immaturity of the immune system or a gastrointestinal disorder, the subject's size, weight, surface area, age, and sex, other drugs being administered, and the judgment of the attending clinicians. Alternatively or in addition, the dosage can be expressed as Pfu/kg of dry weight.

[0292] Administrations can be single or multiple (e.g., 2- or 3-, 4-, 6-, 8-, 10-, 20-, 50-, 100-, 150-, or more fold). The duration of treatment with any composition provided herein can be any length of time from as short as one day to as long as the life span of the host (e.g., many years). For example, a composition can be administered once a week (for, for example, 4 weeks to many months or years); once a month (for example, three to twelve months or for many years); or once a year for a period of 5 years, ten years, or longer. It is also noted that the frequency of treatment can be variable. For example, the present compositions can be administered once (or twice, three times, etc.) daily, weekly, monthly, or yearly.

[0293] The compositions (e.g., a neural stem cell including a chimeric poxvirus) may also be administered in conjunction with other therapeutic agents. In embodiments, the compositions may also be administered in conjunction with anti-cancer agents. Other therapeutic agents will vary according to the particular disorder, but can include, for example, dietary modification, hemodialysis, therapeutic agents such as sodium benzoate, phenylacetate, arginine, or surgical remedies. Concurrent administration of two or more therapeutic agents does not require that the agents be administered at the same time or by the same route, as long as there is an overlap in the time period during which the agents are exerting their therapeutic effect. Simultaneous or sequential administration is contemplated, as is administration on different days or weeks.

[0294] The compounds described herein (e.g., a neural stem cell including a chimeric poxvirus) can be used in combination with one another, with other active agents (e.g. anti-cancer agents) known to be useful in treating a disease described herein (e.g. breast cancer, colon cancer, kidney cancer, leukemia, lung cancer, melanoma, ovarian cancer, prostate cancer, pancreatic cancer, brain cancer, liver cancer, gastric cancer or a sarcoma), or with adjunctive agents that may not be effective alone, but may contribute to the efficacy of the active agent.

[0295] In embodiments, the method includes administering a therapeutic agent. In embodiments, the therapeutic agent is a checkpoint inhibitor protein. In embodiments, the checkpoint inhibitor protein is B7-1, B7-2, PD-1, PD-L1, PD-L2, CTLA-4, CD40, CD40L, CD47, CD48, CD244, CD80, CD86, CD155, IDO, CDK-12, Galectin-9, LAG-3, TIM-3, VISTA, TIGIT, or SIRPα. In embodiments, the therapeutic agent is a small molecule, shRNA, siRNA, amtibody, minbody, diabody, triabody, nanobody or single domain antibody. In embodiments, the therapeutic agent is ipilimumab. In embodiments, the therapeutic agent is pembrolizumab. In embodiments, the therapeutic agent is nivolumab. In embodiments, the therapeutic agent is talimogene laherparepvec. In embodiments, the therapeutic agent is durvalumab. In embodiments, the therapeutic agent is daclizumab. In embodiments, the therapeutic agent is avelumab. In embodiments, the therapeutic agent is a chimeric poxvirus. In embodiments, the therapeutic agent is atezolizumab. In embodiments, the neural stem cell including the chimeric poxvirus and the therapeutic agent are administered at a combined synergistic amount. In embodiments, the neural stem cell including the chimeric poxvirus and the therapeutic agent are administered simultaneously. In embodiments, the neural stem cell including the chimeric poxvirus and the therapeutic agent are administered sequentially.

[0296] In some embodiments, co-administration includes administering one active agent within 0.5, 1, 2, 4, 6, 8, 10, 12, 16, 20, or 24 hours of a second active agent (e.g. anti-cancer agent). Co-administration includes administering two active agents simultaneously, approximately simultaneously (e.g., within about 1, 5, 10, 15, 20, or 30 minutes of each other), or sequentially in any order. In some embodiments, co-administration can be accomplished by co-formulation, i.e., preparing a single pharmaceutical composition including both active agents. In other embodiments, the active agents can be formulated separately. In another embodiment, the active and/or adjunctive agents may be linked or conjugated to one another.

[0297] In an aspect is provided a method of treating cancer, the method including administering to a subject in need thereof an effective amount of a chimeric poxvirus and a neural stem cell (NSC). For the methods and compositions provided herein the chimeric poxvirus provided herein forms part of a neural stem cell when administered. In embodiments, where a further therapeutic agent is administered, the therapeutic agent may be a chimeric poxvirus. Thus, in an aspect is provided a method of treating cancer, the method including administering to a subject in need thereof an effective amount of (i) a neural stem cell (NSC) including a first chimeric poxvirus, wherein the first chimeric poxvirus forms part of the neural stem cell, and (ii) a second chimeric poxvirus. The second chimeric poxvirus may be any one of the chimeric poxviruses described herein including embodiments, thereof.

[0298] In embodiments, the chimeric poxvirus forms part of the NSC. In embodiments, the poxvirus is encoded by a nucleic acid sequence having a sequence identity of at least 70% to SEQ ID NO:1. In embodiments, the nucleic acid sequence including nucleic acid fragments from at least two poxvirus strains selected from the group consisting of cowpox virus strain Brighton, raccoonpox virus strain Herman, rabbitpox virus strain Utrecht, vaccinia virus strain WR, vaccinia virus strain IHD, vaccinia virus strain Elstree, vaccinia virus strain CL, vaccinia virus strain Lederle-Chorioallantoic, vaccinia virus strain AS, orf virus strain NZ2 and pseudocowpox virus strain TJS. In embodiments, the nucleic acid sequence including nucleic acid fragments from cowpox virus strain Brighton, raccoonpox virus strain Herman, rabbitpox virus strain Utrecht, vaccinia virus strain WR, vaccinia virus strain IHD, vaccinia virus strain Elstree, vaccinia virus strain CL, vaccinia virus strain Lederle-Chorioallantoic and vaccinia virus strain AS. In embodiments, the nucleic acid sequence further includes one or more anti-cancer nucleic acid sequences or a detectable moiety-encoding nucleic acid sequence. In embodiments, the chimeric poxvirus is a replication-competent chimeric poxvirus.

[0299] In embodiments, the NSC is a Human Leukocyte Antigen (HLA) II-negative NSC. In embodiments, the NSC is an HB1.F3.CD21 cell.

[0300] In embodiments, the method includes further administering an effective amount of a therapeutic agent. In embodiments, the therapeutic agent is an anti-cancer agent. In embodiments, the therapeutic agent is selected from the group consisting of a small molecule, a nucleic acid, a polypeptide and an antibody. In embodiments, the therapeutic agent is a PD-L1 inhibitor, a CTLA-4 inhibitor or an OX40 inhibitor. In embodiments, the therapeutic agent is a PD-L1 inhibitor. In embodiments, the therapeutic agent is a CTLA-4 inhibitor. In embodiments, the therapeutic agent is an OX40 inhibitor. In embodiments, the therapeutic agent is an anti-PD-L1 antibody, an anti-CTLA-4 antibody or an anti-OX40 antibody. In embodiments, the therapeutic agent is an anti-PD-L1 antibody. In embodiments, the therapeutic agent is an anti-CTLA-4 antibody. In embodiments, the therapeutic agent is an anti-OX40 antibody.

[0301] In embodiments, the composition is effective to treat cancer. In embodiments, the cancer is breast cancer, colon cancer, kidney cancer, leukemia, lung cancer, melanoma, ovarian cancer, prostate cancer, pancreatic cancer, brain cancer, liver cancer, gastric cancer or a sarcoma. In embodiments, the cancer is ovarian cancer. In embodiments, the cancer is metastatic cancer. In embodiments, the ovarian cancer is an ovarian metastasis.

[0302] In another aspect is provided a method of treating cancer, the method including administering to a subject in need thereof an effective amount of a neural stem cell as described herein, including embodiments. In embodiments, the cancer is breast cancer, colon cancer, kidney cancer, leukemia, lung cancer, melanoma, ovarian cancer, prostate cancer, pancreatic cancer, brain cancer, liver cancer, gastric cancer or a sarcoma. In embodiments, the ovarian cancer is an ovarian metastasis

[0303] It is understood that the examples and embodiments described herein are for illustrative purposes only and that various modifications or changes in light thereof will be suggested to persons skilled in the art and are to be included within the spirit and purview of this application and scope of the appended claims. All publications, patents, and patent applications cited herein are hereby incorporated by reference in their entirety for all purposes.

### EXAMPLES

### Example 1: Neural Stem Cell-Delivered Chimeric Pox Virotherapy for Ovarian Cancer

[0304] Ovarian cancer is the most lethal gynecologic malignancy, afflicting approximately 22,000 women per year in the U.S with 14,200 deaths per year in the U.S. Once ovarian cancer has metastasized to the abdominal cavity (stage III), patients have only a 34% 5-year survival rate following standard treatment with surgical debulking and combination chemotherapy. Use of intraperitoneally (IP) delivered combination chemotherapy regimens has improved outcomes; however, these regimens frequently have complications and serious toxic side effects that prevent most patients from completing full treatment cycles. Additionally, most ovarian cancer patients eventually develop chemoresistance, leading to cancer progression and death. Replication-competent oncolytic virotherapy offers a new, highly promising approach for treating ovarian cancer. Once seeded into the tumor, the oncolytic virus can selectively replicate in tumor cells (but not in normal tissue) to destroy tumor cells in situ via direct lysis. Importantly, oncolytic viruses can induce cancer cell death irrespective of radio- or chemoresistance and can also stimulate immune system recognition of cancer cells by exposing tumor antigens upon lysis. Clinical efficacy of this approach has been limited by rapid viral inactivation by the immune system, poor viral penetration of tumors, and an inability of the virus to effectively reach invasive metastatic foci separated by normal tissue.

[0305] We now present a novel conditionally replication-competent chimeric orthopoxvirus (CF33) selected specifically for ovarian cancer cell infection, following screening of over 100 chimeric poxviruses. The CF33 virus was engineered to be tumor specific by deleting the virus's thymidine kinase (TK) gene. Tumor tissues have abnormally high TK expression that complements this gene deletion, permitting viral replication, whereas normal tissue does not. We have modified a tumor-tropic, HLA II-negative neural stem cell line (HB1.F3.CD21 NSCs; demonstrating clinical safety in high-grade glioma patients) that efficiently delivers CF33 to ovarian cancer foci in preclinical models^{[96]}. We demonstrate that NSCs provide protection from immune-mediated clearance and neutralization achieve effective viral distribution to peritoneal ovarian tumors. Co-culture in vitro experiments of NSC-delivered CF33 in human OVCAR8 and murine ID8 ovarian cancer cells showed robust infection of >95% of tumor cells in 6 days, even at a low ratio of 1 NSC:1000 tumor cells. In vivo data show selective distribution of NSC-delivered CF33 to human OVCAR8 and ID8 peritoneal metastases in immunodeficient and immunocompetent mice, respectively. Furthermore, IP-delivered CF33-NSCs showed increased viral distribution to tumor sites (assessed by BLI) compared to a matched viral load of free CF33 when multiple treatment rounds were given in the immunocompetent model. Long-term efficacy studies are in progress to establish the clearance kinetics, immune response, viral distribution, and efficacy of NSC-delivered vs. free CF33. Our long-term goal is to demonstrate efficacy and safety of CF33-NSCs for selective tumor killing in patients suffering from stage III ovarian cancer.

[0306] This cancer has an exceptionally high mortality rate, largely because the majority of patients present at an advanced stage. Use of intraperitoneal (IP) delivered combination chemotherapy regimens (relative to intravenous delivery) has improved outcomes, however, increased complications and toxic side effects are often brutal, with most patients unable to complete the treatment cycles due to severe abdominal pain, nausea, and vomiting. Therefore, new, more targeted and effective therapeutic approaches for treating recurrent and/or drug-resistant ovarian cancer are urgently needed. These findings motivate our need to establish the best schedule to deliver CF33 NSCs. Together, these preliminary data motivate further research because they suggest that CF33 NSCs can selectively penetrate peritoneal ovarian metastases, produce additional CF33 following IP administration and slow tumor progression.

[0307] Key results: 1. NSCs exhibit remarkable tropism to ovarian metastases; 2. CF33 NSCs cells are able to migrate to and kill ovarian cancer cells in vitro; 3. NSCs are able to deliver the CF33 virus to disseminated ovarian metastases in vivo and also slow its progression.

### Example 2

[0308] Conditionally replication-competent oncolytic virotherapy offers a new, highly promising approach for treating ovarian cancer. Once seeded into the tumor, the oncolytic virus selectively replicates only in tumor cells (but not in normal tissue) to destroy the cancer in situ via direct lysis.^{[2]} The lysed cells free additional viral particles that continue to infect neighboring tumor cells, amplifying their anti-tumor effect until normal tissue is reached and viral replication ceases.^{[4]} Oncolytic viruses induce cancer cell death regardless of whether the cancer is radio- or chemoresistant^{[5]} and can stimulate immune recognition of cancer cells^{[6]} by exposing tumor antigens upon cell lysis. Although clinical trials to date have demonstrated the safety of oncolytic viruses,^{[7]} their efficacy has been limited by delivery hurdles, such as rapid immune inactivation, poor penetration of tumors, and inability to reach invasive tumor foci that are separated from the main tumor mass by normal tissue.^{[8]}

[0309] We propose to overcome these barriers by using a clinically-relevant, safe, tumor-tropic neural stem cell (NSC) line (HB1.F3.CD), which can shield viruses from immune recognition en route to metastatic tumor foci. The NSCs will afford an unprecedented ability to amplify viral payloads in situ selectively in ovarian tumors.^{[4, 6, 9]} This approach will be tested using a novel oncolytic chimeric poxvirus, CF33, which replicates specifically in tumors.^{[2, 8, 9]} This specificity arises because CF33 includes a deletion of the gene encoding thymidine kinase, an enzyme needed for nucleic acid metabolism. Therefore, CF33 replication is dependent on cellular thymidine kinase expression, which is high in proliferating cancer cells but not in normal cells. Thus, this approach provides a safe, tumor-selective, immune-protective delivery method to improve oncolytic virotherapy.

[0310] Determine the optimal IP CF33-NSC dose for delivery of maximal viral load. We will determine the CF33-NSC dose that results in maximal delivery of CF33 chimeric orthopoxvirus to peritoneal ovarian metastases in an immunocompetent mouse model. Treatment will be completed with a range of CF33-NSC doses and tumors evaluated using qPCR and IHC to determine the dose that yields the most infectious virus particles in tumors.

[0311] Determine the clearance kinetics of CF33 in vivo. Clearance kinetics will be determined after IP injections of both free virus and CF33-NSCs using the experimentally determined dosage provided herein in an immunocompetent mouse model of peritoneal ovarian metastases. Tumors will be excised after treatment and analyzed by qPCR to quantify infectious virus particle clearance. Ninety percent reduction in the BLI signal compared to BLI signal 1 day after treatment will be considered the optimum time interval between repeat treatment rounds to maximize therapeutic effect.

[0312] Determine the therapeutic efficacy and anti-cancer immune response of CF33-NSCs versus free CF33 in vivo (+/− checkpoint inhibitors). We will conduct repeat IP administrations of CF33-NSCs or free CF33 in an immunocompetent syngeneic mouse model of peritoneal ovarian metastases, monitor tumor progression with bioluminescence imaging, and measure long-term survival. Here, PD-L1 blockade and CF33-NSCs will be combined as a potential treatment strategy for ovarian cancer. Because of its tumor-selectivity, we expect this therapeutic approach will increase long-term survival and reduce toxicities associated with current chemotherapies. These data will provide the basis for a pre-IND submission and IND-enabling studies. This approach may also be applicable to other high thymidine kinase-expressing cancers, such as breast and lung cancer.^{[10,11]}

[0313] Research Strategy

[0314] A. Significance

[0315] Clinical need. Each day, 60 American women are diagnosed with ovarian cancer, equating to nearly 22,000 women afflicted per year. Despite decades of research efforts, ovarian cancer continues to be the most lethal of gynecologic malignancies,^{[1, 2]} largely because the majority (75%) of patients present at an advanced stage (stage III), with widespread metastatic disease within the peritoneal cavity.^{[12]} The median overall survival for these patients is less than 3 years after standard treatment of intravenous or intraperitoneal (IP) administered combination chemotherapy (e.g., cisplatin and paclitaxel)[3]+/−surgical debulking. Quality of life for patients undergoing chemotherapy is poor and associated with such severe side effects, including abdominal pain, nausea, and vomiting, that most patients are unable to complete treatment.^{[13, 14]} Additionally, most ovarian cancer patients eventually develop chemoresistance and succumb to their disease within a few years. This sobering clinical scenario underscores an urgent critical need for new, more effective therapies that can improve both quality of life and treatment outcomes for patients with drug refractory ovarian cancer.

[0316] Oncolytic virotherapy for ovarian cancer. Conditionally replication-competent oncolytic virotherapy is a highly promising approach for treating ovarian cancer. In this novel approach, viruses are modified to preferentially replicate in tumor cells and selectively destroy them in situ via direct lysis.^{[2]} The viral particles freed from lysed tumor cells continue to infect neighboring tumor cells, amplifying their anti-neoplastic effect until normal tissue is reached, causing viral replication to cease^{[4]}. Important for treating cancer, oncolytic viruses have the ability to induce cancer cell death irrespective of radio- or chemoresistance^{[7]} and can stimulate immune recognition of cancer cells^{[6]}. More than 20 oncolytic viruses have been developed so far, and 11 have been tested in pre-clinical human ovarian cancer models^{[2]}. To date, four of these 11 viruses have been tested in 9 phase I/II clinical trials^{[2]}. Most generations of oncolytic viruses currently in human testing were engineered to have highly attenuated activity. Thus, although these clinical trials are still in early stages, they have all established the safety/non-toxicity of this approach^{[7]}, and because toxicities are so low, not a single oncolytic virus trial has established a maximum tolerated dose^{[2]}. However, for the same reason, few trials have produced major responses to therapy. Therefore, the approach taken by most groups engineering new immuno-oncolytic viruses is to make viruses that are much more potent at specifically killing cancer cells. Designing delivery vehicles for these novel viruses could further increase the amount of virus delivered to sites of cancer while minimizing side-effects.

[0317] Oncoviral therapies could theoretically offer a “one-shot” cure, with the viral particles amplifying their antineoplastic effect until normal tissue is reached.^{[4]} Unfortunately, the viral particles are susceptible to rapid inactivation and clearance before they are able to infect tumor cells. To realize the potential of oncolytic therapies for treatment of advanced cancer, dramatically improved delivery approaches are needed so that the viruses can persist without depletion or degradation. It is also clear that clinical application of immuno-oncolytic viruses will require repeated administration of the viruses, which results in greater host immune system inactivation. The main strategies to overcome the antiviral immune response have been to co-deliver the virus with immune-suppressive drugs (e.g., cyclophosphamide or anti-CD20) or to physically shield the virus from immune recognition (e.g., with PEGylated liposomes or cell carriers).^{[15-17]}

[0318] Tumor-tropic stem cells for oncolytic virus delivery. Drawbacks to current methods include recognition by the immune system, poor penetration and distribution through metastatic tumor foci, and limited amplification of viral payloads in situ.^{[4,6,8]} Combining tumor-specific oncolytic viruses with tumor-tropic cells offers potential advantages over free virus or liposome-coated viral delivery (FIG. 21). The first experiments combining viral particles with cell delivery vehicles attempted to passively bind viruses to the surfaces of tumor-tropic T-cells.^{[18]} However, most virus was neutralized before it reached the tumor, suggesting that carrier cells must be transduced with the virus. Because the parameters that control viral uptake efficiency in various cell types are still being discovered, only certain combinations of cells and viral payloads are currently feasible^{[19]}. The ideal cell carrier for oncolytic virus delivery should be chromosomally stable, support viral infection and amplification, shield the virus from the host immune system while en route to the target, and have an intrinsic tumor-homing ability to deliver and seed virus directly to sites of metastases.

[0319] This NSC delivery strategy offers the following advantages over free virus and immune-based cellular delivery vehicles: 1) NSCs express minimal human leukocyte antigen (HLA) class I and no class II molecules, and can shield the virus from the immune recognition en route to tumor sites; 2) NSCs enable improved penetration and distribution of the virus within tumor sites and to invasive metastases; and 3) NSCs afford an unprecedented ability to amplify viral payloads in situ^{[4]}. Thus, NSCs provide a safe, tumor-selective, immune-protective delivery vehicle to improve the efficacy of oncolytic virotherapy.

[0320] Therapeutic candidate: Chimeric orthopoxvirus-producing NSCs. We focus on a novel chimeric orthopoxvirus (CF33) engineered for high potency against ovarian cancer. The CF33 virus is designed to have a favorable safety profile by being conditionally replicative in cancer cells, but not in normal somatic cells. This selectivity has been engineered by deleting the virus's thymidine kinase (TK) gene. Tumor tissues express abnormally high levels of TK, which will permit viral replication. In contrast, normal tissue does not express sufficient levels of TK to allow viral replication.^{[12]} We have engineered our HB1.F3.CD21 NSCs to produce CF33^{[21]} (CF33-NSCs). In studies, the efficacy and safety of HB1.F3.CD21 NSCs engineered to express an oncolytic adenovirus (CRAd-Survivin-pk7) in preclinical brain tumor models have been demonstrated.^{[8,22,23]} These studies support initiation of a phase I clinical trial of the CRAd-S-pk7-NSC approach for newly diagnosed glioma patients (NCT03072134). CF33-NSCs described herein therapeutically surpass previous CRAD-S-pk7 NSCs, because compared to adenoviruses, oncolytic poxviruses have greater viral spread, tumor infection, and cytoplasmic productive replication in tumor cells with no host genome integration and recombination.^{[24,25]}

[0321] CF33 stimulates the expression of PD-L1, an immune checkpoint protein that blocks recognition by immune effector cells, in both tumor and tumor-associated cells. Therefore, we plan to combine CF33-NSCs with administration of a PD-L1 inhibitor.^{[26]}

[0322] In these studies, NSCs are transduced with CF33 virus and frozen into aliquots that are thawed and rinsed just prior to administration per clinical SOPs. CF33-NSCs are then injected IP into mice with peritoneal ovarian metastases. NSCs will selectively target and penetrate tumor metastases, effectively delivering and distributing the CF33 virus. The virus will replicate selectively within tumor cells until they lyse and release virus to surrounding tumor, amplifying its therapeutic effect until normal tissue is reached. IP-administered CF33-NSCs will selectively penetrate IP ovarian metastases and significantly improve clinical outcomes (i.e., decrease tumor burden and/or increase long-term survival) as compared to the free CF33 virus. The methods and compostions provided herein will significantly impact ovarian cancer; it has the potential to both increase long-term survival for stage III ovarian cancer patients and reduce toxicities associated with current therapies. In addition, the proposed CF33-NSCs will serve as an effective stand-alone and/or adjuvant treatment that increases the therapeutic index of current chemotherapeutic regimens. Furthermore, although the proposed study focuses on ovarian metastases, this CF33-NSC platform will be easily translated to other types of peritoneal carcinomas, regardless of their anatomical origin. Upon further development, this platform could also improve outcomes for other peripheral metastatic tumors that overexpress TK (e.g., breast and lung cancers). NSCs may also be capable of improving peritoneal delivery of other therapeutic viruses (e.g., those expressing anti-inflammatory genes to avoid dialysis-induced peritonitis).^{[27, 28]}

[0323] B. Innovation

[0324] Mesenchymal stem cells (MSCs) have been widely tested in preclinical studies as delivery vehicles for oncolytic viruses and are being tested as protectors of viral cargo in an ongoing clinical trial.^{[29]} However, there are major drawbacks to the use of MSCs, including that they are composed of very heterogeneous cell populations, have poor ex vivo loading capacities, and lose their tumor-homing properties after 5-6 passages.^{[30]} Moreover, the amount and quality of autologous MSCs that can be isolated depends on patient age and current health status, and it can take several weeks to generate enough cells for treatment.^{[30]} For example, Mader et al. recently demonstrated that it took 2 weeks after isolation to generate enough MSCs needed for treatment,^{[6]} 20% of which showed abnormal karyotypes.^{[30]} This is concerning because confirmed non-tumorigenicity of any stem cell therapy is of paramount importance. Although MSCs may represent a feasible cell-delivery vehicle for smaller phase I trials, overall they represent an inefficient and poorly reproducible strategy that likely will not pass the regulatory hurdles and scale-up required for phase II or III trials.

[0325] Here, in a departure from work using patient-derived MSCs, we instead propose to use allogeneic, immortalized HB1.F3.CD21 NSC line^{[31]} to deliver oncolytic orthopoxviruses. This line is chromosomally and functionally stable, and has demonstrated clinical safety, non-immunogenicity, tumortropism, and proof-of-concept for tumor-localized chemotherapy production.^{[32]} Demonstrated safety and stability, as well as the practicality and cost-effectiveness of an ‘off the shelf’ product are major advantages of using an established allogeneic cell line for delivery, in contrast to the difficulties and uncertainties of using isolated primary autologous cells. Specifically, HB1.F3.CD21 NSCs will be used to produce CF33, a novel chimeric orthopoxvirus that selectively replicates in tumor cells that overexpress TK. By using cells as tumor-selective, immune-protective delivery vehicles, target viral payloads will be delivered to invasive micrometastatic tumors^{[4]} that are separated from the main tumor mass by normal tissue.^{[33]} This has not yet been possible. Our combination therapy using NSCs to deliver a novel chimeric orthopoxvirus (CF33-NSCs) has never been applied to any metastatic cancer before. The proposed research is a new and substantive departure from the status quo of using patient-derived MSCs to deliver oncoviral therapies within the peritoneal space. In addition, the use of IP-administered CF33-NSCs is the first application of NSC-oncolytic virotherapy for ovarian cancer in patients. Applicants have been the first to use NSCs to deliver therapeutics within the peritoneal cavity, and Applicants' preliminary studies (see Approach) strongly suggest that this approach will be clinically effective. In addition, production of CF33-NSCs will be more efficient and economical than production of patient-derived MSCs because our NSC platform is established as a Master Cell Bank (MCB) at the City of Hope Biological and Cellular GMP Manufacturing Facility and can be expanded, modified, tested, and banked for an “off-the shelf” product readily available for trials at multiple sites. We have now established cell manufacturing and patient preparation standard operating procedures (SOPs) supporting the feasibility of rapid clinical translation of positive results.

[0326] C. Approach

[0327] Preliminary Studies

[0328] CF33 chimeric orthopoxvirus and CF-33 NSCs. Applicants generated, screened, and evaluated novel oncolytic chimeric poxviruses that were highly selective to ovarian cancer (FIG. 1A). Following screening of more than 100 chimeric poxviruses, several chimeras showed superior cancer cell killing in NCI-60 cell lines and were further evaluated. Human OVCAR8 ovarian cancer cells were infected with various multiplicities of infection (MOIs) and assessed for % survival. Based on results (not shown) chimera 33/TK- (CF33) was chosen as an effective therapeutic agent for further studies, including delivery by the HB1.F3.CD21 NSC line. An advantage of using an immortalized, clonal NSC line for oncoviral delivery is that viral transduction and burst kinetics are highly reproducible. We have determined the optimum viral loading into NSCs to be 3×10⁶ PFU per million NSCs, as this amount of viral loading confers approximately 1 MOI per cell, does not alter NSC differentiation status or tumor-tropism in vitro. Cell-associated viral counts reached a maximum at 24 h postinfection, at which point the NSCs lysed (FIG. 1B).

[0329] NSC tropism to peritoneal ovarian cancer metastases models. Ovarian cancer cells typically spread from the primary tumor site into the ascites fluid of the peritoneal space, followed by secondary tumor seeding onto the serosal surfaces of abdominal organs.^{[39]} We generated immunodeficient and syngeneic immunocompetent mouse models of ovarian cancer by inoculating ovarian cancer cells into the peritoneal cavity of nu/nu and C57Bl/6 mice, respectively. High-grade serous ovarian cancer lines were selected and fluorescently labeled (human OVCAR8.egfp/ffluc and murine ID8.dt.tomato). We chose serous ovarian cancer because it is the most frequent histotype of cancer in patients diagnosed with stage III peritoneal disease. Tumor cells seeded predominantly to the greater omentum and serosal surfaces of the liver, kidney, intestines, diaphragm, and pancreas. Tumor growth kinetics and distribution were determined post-IP injection of 10×10⁶ tumor cells (FIG. 2A-2H). We saw tropism of CD-NSCs to tumors in both models.^{[41]} It was also demonstrated that the CF33 orthopoxvirus effectively infects both human and mouse ovarian tumor cells in vitro and in vivo. We selected the immunocompetent model for our CF33-NSC dosing and efficacy studies, described herein, as it permits analysis of the contribution of the immune system on the tumor microenvironment in response to treatment.

[0330] Rapid in vitro infection of ovarian cancer cells with CF33 virus delivered by NSCs. The poor delivery efficiency of standard viral vectors necessitates potent bystander killing effects capable of destroying tumor cells that the administered virus cannot reach. We found that CF33 progeny released from CF33-NSCs produced a considerable local bystander effect against the ID8 ovarian cell cancer line. In vitro co-culture of ID8 cancer cells with CF33-NSCs (tumor cell:NSC ratio of 1000:1) resulted in replication of CF33 in ovarian cancer cells, as shown by amplification of the eGFP signal that progressed until the cells died (FIG. 3A). This was confirmed by analysis of confluency mask of phase images (FIG. 3B) and this indicates the CF33 virus can infect and amplify in neighboring tumor cells.

[0331] CF33-NSC delivery of virus selectively to ovarian metastases. We have demonstrated the tumor tropic properties of NSCs in preclinical models of invasive and metastatic tumors, including brain tumors,^{[37, 38]} breast carcinoma,^{[39]} metastatic neuroblastoma,^{[40]} and most recently peritoneal ovarian metastasis (NSCs delivered IP).^{[41]} We have also found that viral loading does not impair the tropism of NSCs to tumor metastases within the peritoneal cavity and that NSC-delivered virus spreads into tumors. The initial experiment was in the OVCAR8 nu/nu immunodeficient mouse and NSCs were not dectected in non-tumor tissue. (FIG. 4A, 4B). To confirm transfer of virus to tumor foci in an immunocompetent model, we treated C57Bl/6 mice with established IP ID8 tumors with CF33-NSCs, CF33 (matched viral load), or PBS control (FIG. 5A, 5B, 5C). Tumors were harvested 4 days after NSC administration and fluorescent immunocytochemistry using anti-vaccinia Ab performed on tumor cryosections.

[0332] NSCs localize to ovarian tumor foci within 1 hour post IP administration. In studies looking at NSC distribution in ovarian cancer models, we conjugated the NSCs to gold Nanorods (AuNR) for quantification of gold localized to tumor foci with ICP mass spectroscopy. No significant difference was observed in gold delivered by the NSCs at tumor foci between 1 hour and 72 hour post IP NSC administration (FIG. 5D).

[0333] IP Administration of CF33-NSCs resulted in enhanced virus delivery to ovarian cancer metastases as compared with free CF33. To test if IP administered CF33-NSCs could deliver live CF33 to IP ovarian metastases, we conducted a pilot study (n=3 per group). C57Bl/6 with established ID8 IP metastases were treated with a matched viral load of either free CF33 or CF33-NSCs (CF33 labeled with ffluc; viral load 3×10⁶ CF33 PFU in 2×106 NSCs). In vivo bioluminescence imaging (BLI) for virus-specific gene expression (ffluc) was performed one hour after treatment (FIG. 6. Tx 1). Mice that received CF33-NSCs (right) showed significantly stronger signal than did those that received free CF33, after the first round of treatment (p=0193). This suggests improved delivery and distribution of virus to tumor foci. Mice then received a 2nd treatment one week later, and BLI was performed after 1 hour (FIG. 6, Tx 2), showing that the Signal remained significantly higher in mice receiving CF33-NSCs as compared to free CF33 (p=0.0218) which had no signal, likely due to immune inactivation of the free virus. These data support demonstrate that viral delivery by NSCs will provide an advantage over free virus by 1) improving penetration and distribution of virus through tumor foci, and 2) upon repeat treatment rounds, potentially shield virus from neutralization by the immune system en route to the tumor. To better investigate if clearance is mediated by immune clearance, the proposed studies will include weekly sampling of blood to assay immune response [e.g., antibody neutralization and cytokines] after each CF33-NSC or free CF33 administration.

[0334] In a similar pilot study, C57Bl/6 immunocompetent mice (n=5 per group) with established ID8 ovarian metastases were treated with either free CF33 or CF33-NSCs (matched viral load, 3×10⁶ PFU/mouse). Mice treated with PBS served as a negative control. In this study, the 2^{nd} treatment was given 3 weeks after the initial treatment. Whole animal BLI was performed 1 day post-treatment for distribution of the virus within the peritoneum. Presence of virus in individual tumors isolated at harvest was confirmed using BLI (FIG. 7). Again, data suggest the immune system immediately inactivated and cleared the free virus, as no viral signal was detected in mice given free CF33 on day 1 post 2nd treatment. In contrast, 3 out of 5 mice that received CF33-NSCs had a detectable signal at day 1. We will more extensively investigate immune clearance of the virus over time, with daily in vivo whole body BLI and sampling of blood for analysis of immune and cytokine profile.

[0335] Collectively, these preliminary data support the feasibility of the proposed work, confirming the ability of NSCs to selectively target and deliver the CF33 oncolytic virus to peritoneal ovarian metastases in vivo and our ability to monitor its presence using established techniques.

[0336] Determine the Optimal IP NSC Dose for Delivery of Maximal CF33 Viral Load.

[0337] Introduction: Our preliminary studies demonstrate 1 hour after 2×10⁶ CF33-NSCs are injected IP, most macroscopic tumors contain at least some NSCs. It is not yet known if administering a greater number of CF33-NSCs, or perhaps administering fewer CF33-NSCs more frequently, would result in better tumor coverage. The dosing strategy that maximizes the initial localization of CF33 NSCs in peritoneal metastases is determined. We will test the working hypothesis that multiple, lower dose injections will be the most efficient strategy to achieve maximal CF33 delivery to IP metastases. In our studies of intravenous NSC administration in various tumor models, it was shown that dividing a single high dose into multiple lower dose administrations result in a greater number of NSCs localized to tumor sites. NSC-mediated delivery of CF33 to IP metastases will be assessed using standard biochemical and immunological assays. Establishing the proportional relationship between numbers of tumor-localized NSCs and the CF33 levels initially delivered to IP metastases is critical for fully designing the viral amplification and clearance studies planned. The dosing strategy determined herein will be used for determining clearance kinetics and therapeutic efficacy and anti-cancer immune response of CF33 vs CF33-NSCs in vivo.

[0338] Given these challenges, our approach to maximize viral load at disseminated metastases will be to maximize the number of CF33-NSCs present per tumor. One advantage of NSC-mediated viral delivery is that consistent NSC transduction efficiencies from batch to batch and consistent viral release times from transduced NSCs can be confirmed. Thus, we expect to observe a directly proportional relationship between the number of tumor-localized NSCs and CF33 viral particles. This controlled approach is not possible for other studies that deliver viral payloads using patient-derived MSCs, because transduction efficiencies and burst times vary significantly from patient to patient, isolation to isolation.

[0339] Research Design: All mouse studies will use female mice, as ovarian cancer is a female-specific disease Immunocompetent C57Bl/6 8-12 week old female mice will be inoculated IP with ID8 syngeneic ovarian tumor cells expressing Renilla luciferase (ID8RLuc). As per previous growth kinetics studies of this model, we expect that by 3 weeks after inoculation mice will have established a few macroscopic and numerous (>20) microscopic tumors, ensuring an adequate number of metastatic tumors available for analysis. BLI will be used to confirm tumor engraftment. Experiment 1.1: Mice bearing confirmed tumors will be IP injected with DiI-labeled CF33-NSCs (0.1×10⁶, 2×10⁶, or 4×10⁶ cells; 10 mice per dose). Twenty-four hours later, mice will be euthanized to determine NSC presence within metastatic tumors after a single administration. Experiment 1.2 Dil-labeled CF33-NSCs (2×10⁶ cells) will be given as either 1, 2, or 4 separate administrations within an 8-hour period (10 mice per administration group) and tumors will be collected 24 hours after the final administration to determine if a greater number of NSC administrations results in more efficient delivery of CF33. For both experiments 1.1 and 1.2, the location, size, and weight of macroscopic tumors will be recorded (Table 1). Ten tumors per mouse will be processed for qPCR quantification of the NSC-specific gene v-myc, of which there is 1 copy per NSC, to determine the number of NSCs present at each tumor. The number of NSCs at each tumor will be correlated with viral load, as assessed using qPCR for vaccinia gene expression and viral titration assays. The remaining tumors will be sectioned and stained with human specific nestin and antivaccinia antibodies to visualize NSC and viral co-localization.

[0340] Biostatistical analysis: The primary outcome of these experiments is the delivery of maximal virus load, which will refer to as virus retention hereafter. Virus retention will be compared among the various NSCs doses (Experiment 1.1) and numbers of injections (Experiment 1.2) (Table 1). Using a chi-square test with a 0.05 one-sided significance level, we will achieve statistical power of at least 85% to detect the difference between a dose with virus retention of 0.7 and a dose with retention of 0.15, when the sample size in each group is 10. This sample size justification also applies to Experiment 1.2 for one administration (virus retention of 0.70) vs. separate administrations (virus retention of 0.15). Multiple comparisons will not be corrected because of the relatively small sample size. Success Criteria: Identification of a CF33-NSC dose level (and number of injections) that increases virus retention at IP metastases by at least 50% compared with 0.1×10⁶ NSCs.

[0341] Expected Outcomes: Injecting 2×10⁶ CF33-NSCs in preliminary studies may be wasteful, as less than 10% of NSCs were detected within tumors 1 day after injection. Thus, we expect to find a lower dose, such as of 0.1×10⁶ CF33-NSCs could saturate the number of NSCs localized to IP metastases on day 1. Likewise, we expect that splitting this dose into multiple injections over the course of 8 hours will increase the number of NSCs at the tumor foci. This expectation is based on our data in which a given dose of NSCs administered intravenously was given as a single dose or divided into 2 or 3 doses given multiple times within 24 hours, resulting in an increase of NSCs at the tumor sites of 4-8-fold.

[0342] Potential Pitfalls and Alternatives: Although we expect to identify an NSC dose at which the number of tumor-localized NSCs saturates, none of the tested doses may change the number of tumor-localized NSCs. In this unlikely event, we would consider that the dose range used is too high, in which case, experiments will be repeated with lower doses. Although it is expected that 2 administrations will maximize the NSC distribution to IP metastases, 4 administrations may be even more effective. If this is the case, we will repeat the study with multiple administrations until a dosing strategy that results in maximal NSC coverage of IP metastases is identifed as determined by qPCR for v-myc (1 copy per NSC) and/or qPCR for CF33.

[0343] In an attempt to optimize the dosing strategy for human tumors, we could use mice reconstituted with human immune systems instead of immunocompetent mice. However, several mouse organs (e.g., bone marrow mesenchymal cells and endothelium) cannot interact effectively with grafted human leukocytes due to species specificity, and the interaction between mouse gut flora and the human immune system may be paradoxical. In addition, grafting is often performed utilizing an identical batch of stem cells in highly inbred animals, which fails to account for human heterogeneity. Limiting factors also include the substantial cost and restricting supply of animals.^{[44]} As an alternative to NSC-mediated CF33 delivery, we may test the efficacy of CF33 packaged in nanoparticles (NPs). However, only a few liposomal and protein-based NPs have been approved for the delivery of cancer drugs, including Doxil and Abraxane, and these NPs are passive targeting delivery agents that rely on the enhanced permeability and retention (EPR) effect for tumor localization.^{[45,46]} Liposomal NPs are limited by particle instability, rapid clearance, and spontaneous membrane fusion with off-target cells.^{[47,48]} Polymer-based NPs suffer from structural heterogeneity, particle instability, slow and non-uniform drug release, and potential immunogenicity.^{[49]} More stable metal-based NPs suffer from a lack of specificity and high toxicity.^{[50]} In addition, most of these NPs are limited by clearance mediated by phagocytes and dendritic cells, including Kupffer cells in the liver. Coating NPs with polyethylene glycol (PEG) can help avoid phagocytes and extend the blood circulation time by creating “stealth” brushes^{[51]}, 18; however, PEGylation can also reduce NP uptake by the targeted cells and is potentially immunogenic.^{[52,52]} Finally, surface functionalization of these NPs is difficult to control and non-uniform.^{[53]}

[0344] Determine the Clearance Kinetics of CF33 In Vivo.

[0345] Introduction: We expect that after IP injection, CF33-NSCs will home to tumor sites and begin amplifying viral progeny until the NSCs burst and transfer the viral payload to neighboring tumor cells. The virus should continue to amplify throughout the tumor, but many viral particles will also be cleared, eventually leaving minimal active virus within the abdomen. The objective of this study is to establish the time course over which viral amplification and clearance occurs after single and repeated administrations. We will test the working hypothesis that viral clearance will be delayed in CF33-NSC-treated mice as compared to mice receiving free CF33 since our preliminary data show loss of CF33 BLI signal in the free CF33 group after the 2^{nd} treatment. Viral presence within IP metastases at select time points will be determined using standard biochemical and immunological assays. Successful completion of this study will provide fundamental, necessary data demonstrating improved viral persistence and distribution when delivered using an NSC vehicle. The time course of viral persistence identified will inform the repeat dosing intervals used for determining the therapeutic efficacy and anti-cancer immune response of CF33-NSCs versus free CF33 in vivo.

[0346] Research Design: Immunocompetent syngeneic 8-12 week old female C57Bl/6 mice will be inoculated IP with ID8 tumor cells (Table 1). As per previous growth kinetics studies of this model, by 3 weeks after inoculation, mice will have established a few macroscopic and numerous (>20) microscopic tumors, ensuring an adequate number of metastatic tumors available for analysis. BLI will be used to confirm tumor engraftment. Experiment 2.1: Mice bearing engrafted tumors will be IP administered the predetermined dosage of CF33-NSCs or free CF33 (matched viral load). At select time points (pretreatment, and 1 h, 3 d, and 7 d after the last treatment) 10 mice will be euthanized to determine viral persistence within metastatic tumors. Experiment 2.2: Two CF33-NSC administrations will be delivered, spaced according to the interval determined in Experiment 1.2. For both experiments, the location, size, and weight of macroscopic tumors will be recorded. The viral load within 10 tumors per mouse will be quantitatively determined using both qPCR (for CF33 gene expression) and viral titration assays. The remaining tumors will be sectioned and stained with anti-vaccinia ab for CF33 to determine the time course of CF33 tumor penetration. BLI data will also be utilized to assess clearance and retention profile of the virus.

[0347] Biostatistical analysis: The primary outcome of these experiments is virus retention. since the slower the clearance, the higher the virus retention and the more time for virus to replicate in the tumor tissue. At each time point, virus retention will be compared between the free CF33 and CF33-NSC groups. Using a chi-square test with a 0.05 one-sided significance level, we will achieve statistical power of at least 85% to detect the difference between the virus retention, p1, for the CF33-NSCs (predicted to be 0.65) and p2 for the free CF33 group (predicted to be 0.10) when the sample size in each group is 10. Exploratory repeated measures analysis will be carried out to examine possible trends in retention over time. Multiple comparisons will not be corrected because of the relatively small sample size. Similar analyses will be carried out for clearance kinetics using BLI data.

[0348] Expected Outcomes: We expect to observe tumor tropism of CF33 NSCs within the first hour after injection. After a delay of 24 hours, the viral dose initially delivered to the tumors is expected to have amplified within the NSCs to induce lysis and transfer of mature viral particles to neighboring tumor cells. We expect to identify the time window during which viral load peaks and clears (1 week expected based on preliminary data). We also expect to see consistent viral clearance rates upon repeated treatment rounds when CF33 is delivered via NSCs, but accelerated clearance rates when delivered as a free virus. This information will be used for determining therapeutic efficacy and anti-cancer immune response of CF33 versus NSC-CF33 and will guide choice of dose interval frequency. Finally, we expect to see improved CF33 penetration and distribution in CF33-NSCs relative to free virus, given that NSCs will have 24 hours to penetrate biological barriers before they lyse. These barriers limit free viral distribution, which relies on passive viral diffusion. Success Criteria: Determination of the time required for 90% of initially delivered CF33 to clear from IP metastases. The longer the time required for this clearance the more effective we expect treatment to be.

[0349] Potential Pitfalls and Alternatives: In the unlikely event that both viral amplification and clearance are unable to be observed over the chosen timescale, time points will be adjusted to allow more/less time. Although we expect the viral load to be relatively consistent among the various metastases (given our observation that NSC tropism to ovarian metastases occurs irrespective of size or location) it is possible that some tumors will attract NSCs more than others or be better able to amplify the virus. Even if this is the case, a peak overall viral load should be identified within the tumors by averaging the load within multiple metastases.

[0350] Determine the Therapeutic Efficacy and Anti-Cancer Immune Response of CF33-NSCs Versus Free CF33 In Vivo (with and without Checkpoint Inhibitors).

[0351] Introduction: We will assess the therapeutic efficacy of CF33-NSCs. The objective of this study is to establish pre-clinical data demonstrating whether CF33-NSC treatment is effective as a stand-alone therapy or if co-administration with a PD-L1 antibody (PD-L1 Ab) might confer additional therapeutic benefit, as it might overcome tumor immune tolerance and enhance immune recognition of cancer cells. We will test whether repeated rounds of CF33-NSC injections alone or with a PD-L1 antibody will significantly improve the survival of tumor-bearing mice as compared to control mice that receive no treatment or free CF33 with or without checkpoint inhibition (FIG. 20). We will use a standard Kaplan-Meier survival comparison to determine the utility of this treatment in immunocompetent syngeneic mice. Changes in the composition/activity of tumor-associated immune cells, such as dendritic cells, macrophages, myeloid-derived suppressor cells, NK, and T lymphocytes, as well as the expression of PD-L1 and PD1 on myeloid cells and T lymphocytes, respectively, will be evaluated using flow cytometry and functional assays. Successful completion of this Aim will contribute new information regarding the potential efficacy of CF33-NSCs for treating ovarian cancer and the extent to which the oncolytic and immune-stimulatory properties of CF33 are responsible for this effect.

[0352] Immune checkpoint blockade is inefficient in ‘cold’ tumors, which are poorly infiltrated by immune cells and also have low expression of PD-L1 on their surface. In the absence of available targets, immune checkpoint blockers like anti-PD-L1 (which targets PD-L1 expressed on the surface of cancer cells or on antigen-presenting cells), alone or in combination with anti-CTLA-4, remain therapeutically inefficient. Therapeutic administration of oncolytic viruses into tumors promotes the expression of PD-L1 on the surface of cancer cells and PD-1 and CTLA4 on immune cells. Thus, antiviral immunological events inflame the tumor, making it ‘hot’ and suitable for checkpoint blockade cancer immunotherapies. When checkpoint inhibitors are subsequently administered, they can bind to their respective targets on either cancer or immune cells. In addition, anti-PD-L1 therapy can stimulate an immune response to the tumor to strengthen the effects of the virus (FIG. 25). NK cell: Natural killer cell; PD-1: Programmed death-1; PD-L1: Programmed death ligand-1; CTLA-4: Cytotoxic T-lymphocyte-associated protein 4. Furthermore, oncolytic viruses can sensitize tumors to the therapeutic effects of immune checkpoint inhibition, including anti-PD-L1 therapy. Thus, combined oncolytic virus and checkpoint blockade therapy is shown to be highly effective against cancer (FIG. 26).

[0353] Exemplary immune checkpoint inhibitors used herein include without limitation, anti-PD-1, anti-PD-L2, anti-CTLA-4, Anti-TI<−3/LAG3, Anti-OX40, Anti-IDO, Anti-GITR, Anti-4-1BB/CD137]]

[0354] Research Design: Immunocompetent female C57Bl/6 mice (8-12 weeks old; n=80) will be inoculated IP with ID8 tumor cells. Treatment will begin one week later to mimic the clinical scenario of early stage or optimal post-surgical debulking of stage III ovarian cancer. Five treatment groups (16 mice/group) will include: 1) PBS (control); 2) free CF33; 3) CF33-NSCs; 4) CF33-NSCs+PD-L1 Ab (200 ug/mouse i.p.); and 5) PD-L1 Ab only. Groups 2-4 will have a matched viral load determined in Aims 1 and 2. Mice will be randomly assigned to each group. Four mice per group will be euthanized one week after two repeated treatment rounds. The remaining 12 mice will receive two additional treatment rounds and will be followed for long-term survival. Blood will be sampled weekly for assessment of CD4 and CD8 cells, regulatory T cells (Tregs), tumor associated macrophages (TAMs), dendritic cells and proinflammatory (IFNs, IL-1, IL-6, TNFa) vs immunosuppressive (IL-10, TGFb) cytokines, and anti-pox antibodies will be measured using Luminex assays. Whole body BLI will be performed as described above to follow tumor progression and viral distribution (FIG. 27). Coelenterazine IV (100 μl) and D-luciferin potassium salt (150 mg/kg) will be injected IP 10 min before in vivo imaging. After euthanasia or natural death, 10 tumors per mouse and peritoneal organs will be processed to determine viral load by viral titrations performed using dissociated tumor lysates. The metrics for each comparison are: 1) expression of the orthopoxvirus A-type inclusion protein (ATI) gene per mg of tumor and 2) viral titer/mg tumor and flow cytometry. Remaining tissues will be sectioned and stained to detect immune cell markers (including CD4 and CD8; dendritic cell cytokines Th1, Th2 and Th17; and anti-pox antibodies). Blood collected by cardiac puncture and peritoneal fluid aspirated by a syringe will be collected right after euthanasia and assayed by qPCR for these immune cells and viral particles. The immune and cancer cell viability/proliferation will be evaluated using flow cytometry and microscopy after Annexin V and/or BrdU staining. We will assess tumor infiltration by cytotoxic/exhausted CD8⁺ T cells (PD1⁺/CTLA4⁺/LAG3⁺), CD4⁺Foxp3⁺ Tregs, myeloid-derived suppressor cells (CD11b⁺Gr1⁺), and tumor associated macrophages (TAMs; CD11b⁺F4/80⁺). In TAMs and dendritic cells we will assess markers of APC activation, such as MHC class II, CD40, CD80, CD86, IL-12 secretion, and IFN. Cytokines analysis from tumor tissue will be assessed using cytokine microarrays. To verify whether any of the tested treatments generates immune responses against specific tumor antigens, we will rechallenge surviving mice with an unrelated orthotopic cancer model (e.g., MC38) after the initial ID8 challenge. Finally, we will use ID8-OVA cells to verify the generation of tumor antigen-specific T cell-specific immune responses using IFNγ ELISPOT assays after recall stimulation with MHC class I- (OVA₂₅₇₋₂₆₄) or II- (OVA₃₂₃₋₃₃₉) restricted peptides.

[0355] Biostatistical analysis: The primary outcome is long-term survival. In particular, we will compare survival proportions between the mice given CF33-NSCs (group 3) and those given free CF33 (group 2) at 120 days post final treatment. Using a chi-square test with a 0.05 one-sided significance level, we will achieve statistical power of at least 80% to detect a survival proportion difference of 0.50 (assuming survival proportions of 0.20 for the free CF33 group and 0.70 for the CF33-NSC group) when the sample size for each group is 12. Similar analyses will be conducted to compare CF33-NSC+PD-L1 Ab (group 4) to no treatment (group 1) and PD-L1 Ab alone (group 5) and CF33-NSC (group 3) treatments. Viral titer comparisons will be explored using linear mixed effects models to account for inter-mouse variability.

TABLE 1
Summary of in vivo studies

| | | |
|---|---|---|
| Study Proposed | Study population/Study groups | Sample size (SS) |

Determine the optimal IP CF33-NSC dose
for delivery of maximal viral load

| | | |
|---|---|---|
| 1.1. | ID8 Model | Total = 20 mice |
| | 2 Treatment groups of Dil labeled FFLUC CF33- | 2 × 10 mice/dose = 20 mice |
| | NSCs | |
| | 1) IP-0.1 × 10⁶ | |
| | 2) IP-2 × 10⁶ | |
| 1.2. | ID8 Model | Total = 20 mice |
| | 2 Treatment groups of Dil labeled FFLUC CF33- | 2 groups |
| | NSCs | 2 × 10 mice/group = 20 mice |
| | 1) IP-2 × 10⁶ | |
| | 2) 4 Tx IP-0.5 × 10⁶ | |

Determine the clearance kinetics of CF33 in vivo

| | | |
|---|---|---|
| 2.1 | ID8 Model | Total = 70 mice |
| | 1 dose Dil labeled FFLUC CF33-NSCs (IP-2 × 10⁶) | 2 studies × 4 groups per study |
| | or free FFLUC CF33 (IP- 3 × 10⁶ PFU, matched | (but with only one |
| | viral load) | pretreatment group since it is |
| | 4 groups per study: | the same for both) × 10 |
| | 1) pretreatment | mice/group |
| | 2) 1 hr after treatment | |
| | 3) 3 d after treatment | |
| | 4) 7 d after treatment | |
| 2.2 | ID8 Model | Total = 70 mice |
| | 2 doses Dil labeled FFLUC CF33-NSCs (IP-2 × 10⁶) | 2 studies × 4 groups per study |
| | or free FFLUC CF33 (IP- 3 × 10⁶ PFU, matched | (but with only one |
| | viral load) spaced according to the interval | pretreatment group since it is |
| | determined in Experiment 2.1 | the same for both) × 10 |
| | 4 groups per study: | mice/group |
| | 1) pretreatment | |
| | 2) 1 hr after 2nd treatment | |
| | 3) 3 d after 2nd treatment | |
| | 4) 7 d after 2nd treatment | |

Determine the therapeutic efficacy and anti-cancer
immune response of CF33-NSCs versus free CF33 in vivo

| | |
|---|---|
| ID8 Model | Total = 80 mice |
| Treatment groups will receive 2 Treatments of | 5 groups per study × 16 |
| the following based on interval determined in | mice/group |
| Experiment 2.2 starting 1 week after tumor | |
| implantation: | |
| 1) PBS (IP) (Control) | |
| 2) Free FFLUC CF33 (IP- 3 × 10⁶ PFU) | |
| 3) FFLUC CF33-NSCs (IP-2 × 10⁶) | |
| 4) αPD-L1 (IP-9″ mg/kg) | |
| 5) FFLUC CF33 -NSCs (IP-2 × 10⁶) + αPD-L1 (IP- | |
| 9″ mg/kg) | |
| 4 mice will be euthanized one week after the | |
| 2nd treatment and the remaining 12 will be left | |
| for long term survival | |

[0356] Scientific Rigor: To ensure scientific rigor, CF33-NSCs will be made from a research-grade bank throughout entire whole study. We will determine the optimal CF33-NSC administration protocol by testing several dosing regimens in while determining the optimal IP CF33-NSC dose for delivery of maximal viral load and determining the clearance kinetics of CF33 in vivo. Because the oncolytic activity of CF33-NSCs is based on the contribution of an active immune system, it is critical that we test it in a syngeneic immunocompetent mouse model. The only currently available model meeting these criteria is C57Bl/6 mice engrafted with ID8 cells. The C57Bl/6 mice will be purchased from Jackson Laboratories. Based on our earlier studies, we anticipate that 12 mice per group will be required to evaluate significance. CF33-NSCs were initially tested on human ovarian cancer OVCAR8 cells to show its permissiveness to CF33, thus supporting the feasibility of using CF33 in clinical trials. We have incorporated blinding and randomization to reduce bias, adhere to strict laboratory practices for data collection and analyses, and ensure transparency in reporting results. The order of treatment of individual mice will be randomized using a random number generator to avoid grouping identical protocols in time. Separate investigators will be responsible for assigning treatment protocols, performing treatments, and collecting data. For protocols involving data acquisition, the investigators will be blinded to treatment conditions and will not be made aware of the treatment allocations until all data have been collected and analyzed.

### Example 3

[0357] The following studies demonstrate the efficacy of NSC-CF33 and collectively compare antitumor activity of NSCs CF33 (with mCherry, EGFP, or Luciferase), oncolytic viruses CF17 or CF189 for brain (GL261 and U87), breast (4T1 and MCF-7) and ovarian (ID8 and OVCAR8) cancer cell lines. A ratio of 1 NSCs oncolytic virus:1000 cancer cells was used. CF33 is shown to be the most efficacious oncolytic chimeric pox virus followed by CF17 with CF189 the least potent virus.

[0358] Neural stem cell (NSC) line HB1.F3.CD was tested for viability post incubation with CF33 and the CF33 loaded HB1.F3.CD was again assessed for viability post-thaw. HB1.F3.CD cells were incubated for 4 hours in transfection media with CF33 virus at MOI=3 and cell viability was tested (FIG. 19A). Cells were stored in Cryostor media and frozen. After thawing, the NSC-CF33 thaw viability was tested (FIG. 19B). The NSC-CF33 were then added to tumor cells at a ratio of 1 NSC-CF33:to 1000 cancer cells for in vitro experiments to test mouse and human cancer permissiveness to CF33 when CF33 is carried by NSCs.

[0359] Treatment combinations of free CF33/11K-Luc2 or CF33/11K-Luc2 carried by NSCs will be used for CF33-NSCs ovarian cancer studies. The following treatment combinations with two weekly treatments will be used in the studies (Table 2).

TABLE 2
Treatment Combinations

| | Number of animals × cells (NSCs) × |
|---|---|
| Composition administered | viral concentration |
| PBS | 8 mice × 6 PFU |
| PD-1 Ab | 8 mice × 6 PFU |
| CTLA1 (or GITR or ox40 or | 8 mice × 6 PFU |
| IDO etc.) | |
| PD-1 Ab + CTLA4Ab | 8 mice × 6 PFU |
| Free CF33 | 8 mice × 6 PFU |
| CF33-NSCs | 8 mice × (4 × 10⁶ cells) × 3 PFU |
| CF33-NSCS + PD-1 | 8 mice × (4 × 10⁶ cells) × 3 PFU |
| CF33-NCSs + CTLA4 | 8 mice × (4 × 10⁶ cells) × 3 PFU |
| CF33-NSCs + PD-1 + CTLA4 | 8 mice × (4 × 10⁶ cells) × 3 PFU |

[0360] The range of MOI for oncolytic viral infection into carrier cells is MOI=1 to 5. The optimized MOI is MOI=3. The dosage range for oncolytic virus-NCS administration is 100,000,000 to 200,000,000 cells. The optimized administration schedule is 150,000,000 cells once a week for two weeks. The clinical protocol for NSC administration in combination with virus is injection of 150,000,000 CF33-NSC once a week for two weeks simultaneously with ICI.

[0361] In vivo efficacy of the free CF33 virus versus the NCS-CF33 will be investigated in mouse models for human ovarian cancer (FIG. 23). On day 0, eight fourteen week old female C57BL/6 mice will be IP implanted with 10×10⁶ ID8 cells that express lentivirus-tdTOMATO (ID8 LV tdTOM). Three treatment rounds will be completed on days 28, 35, and 42. The treatment rounds include IP injection of 500 uL of 3.0×10⁶ PFU free CF33 per mouse in a four mice group, and IP injection of 500 uL of 2.0×10⁶ NSC-CF33 in second four mice group. Bioluminescent (BLI) imaging will be used to monitor tumor progression immediately after each treatment round and 1 day, 2 days, 3 days, and 4 days after each treatment round. Mice will be euthanized on day 65 to detect tumor progression. Harvesting will be conducted by collecting the pluck, diaphragm, and peritoneal fluid of the mice.

[0362] In vivo efficacy of free CF33 versus NCS-CF33 treated mice was assessed by CA 125 levels (cancer antigen 125). Levels of blood CA 125 are used to monitor certain cancers during and after treatment. CA 125 measurements were completed at intervals following tumor-implantation and treatment with either free FFLuc-CF33 or FFLuc-CF33-NSC. Mouse plasma CA 125 levels in mice treated with NSC-CF233 were consistently lower than in mice treated with free CF33, with the exception of one week following Treatment Round 3 (FIG. 24). Mouse plasma CA 125 levels decreased drastically from two weeks post-Treatment Round 3 to three weeks post-Treatment Round 3.

### Example 4: Thaw and Preparation of HB2.F3.CD_CRAD-S-PK7 for Clinical Administration

[0363] PURPOSE: To provide detailed instructions for the preparation of HB2.F3.CD_CRAd-S-pk7, Neural Stem Cell loaded with CRAd-S-pk7 adenovirus from a cryopreserved bank for clinical administration.

[0364] SCOPE: This procedure applies to the preparation of cells for clinical administration from a cryopreserved vial(s) of HB2.F3.CD_CRAd-S-pk7 Cell Bank. This procedure will be used for the preparation of HB2.F3.CD_CRAd-S-pk7 cells in the Cellular Therapies Production Center (CTPC) or other City of Hope (COH) Cleanroom Facilities for clinical administration. This is intended for use by the Principal Investigator for clinical trials conducted at City of Hope.

[0365] Procedure:

[0366] Procedural Set Up

[0367] Wipe down all working surfaces in the clean room with 70% IPA. Turn on the Biosafety Cabinet and turn on UV for a minimum of 15 minutes. Turn on the centrifuge to 4° C. and set it at 1500 rpm for 5 minutes.

[0368] Preparation of PFCNS+2% HSA (Wash Buffer/Product Diluent)

[0369] Remove packaging from the 125 mL sterile bottle and clearly label the bottle “PFCNS+2% HAS; initials, date, and time”. Remove outer packaging from the Perfusion Fluid-CNS (PFCNS) box. Using a wipe sprayed with IPA, carefully snap off top each of the 19 vials of PFCNS. Using a 10 mL syringe with needle, transfer 92 mL of PFCNS into the labeled bottle. Using a 10 mL syringe with needle, transfer 8 mL of 25% Human Serum Albumin (HSA) to the labeled bottle.

[0370] Thaw & Washing of the Cells

[0371] Affix the three labels (Label 1) obtained from QA on three 50 mL conical tubes that will be used to store the wash supernatants. Fill in the expiration date (60 days post preparation) and designation Wash #1, Wash #2, and Wash #3, respectively. Obtain a new 50 mL conical tube and label it as “A”. using a 50 mL serological pipette transfer 30 mL of wash buffer into this tube.

[0372] Thaw vials quickly until no ice is visible. Record the time of start and end time below. Immediately, wipe the vial with 70% IPA and place it in the Biologic Safety Cabinet (BSC). Centrifuge (4° C.) the “A” tube for 10 minutes at 1500 rpm. After centrifugation, carefully collect all supernatant into the tube labeled “Wash #1”. Be careful not to disturb the cell pellet. This supernatant will be used for Bactec/Fungal testing.

[0373] Resuspend the cell pellet in 40 mL of wash buffer for second wash. Centrifuge (4° C.) for 10 minutes at 1500 rpm. After centrifugation, carefully collect all supernatant into the tube labeled “Wash #2”. Be careful not to disturb the cell pellet.

[0374] Obtain a new 15 mL conical tube and label it as “B”. Resuspend the cell pellet in 5 mL of wash buffer and transfer the cells to the new tube labeled “B”. Rinse the “A” tube with an additional 5 mL wash buffer and transfer it into “B” tube. (10 mL total). This cell suspension (Tube B) will be used for the viability and gram stain release tests.

[0375] Viability and Cell Count of HB2.F3.CD_CRAd-S-Pk7 Cells:

[0376] Based on the reference table below (Table 3), take an aliquot form the tube “B” to count. Manually count viable and dead cells according to SOP-0306 Trypan Blue exclusion using Hemocytometer (minimum count 4 squares of 100 cells). Record values and complete calculations (Table 4).

TABLE 3
Suggested Dilution for Cell Count and Viability
Suggested Dilution for Cell Count and Viability by Trypan Blue Exclusion

| | | | | | |
|---|---|---|---|---|---|
| Cell | Approximate | | Cell | 0.04% Trypan | |
| Dose | Concentration of Cells in | Dilution | Suspension | Blue Volume | Check the |
| Level | suspension (cells/mL) | Factor | Volume (uL) | (uL) | row used |

| | | | | |
|---|---|---|---|---|
| 5.0E+07 | ~5.6E6 | 20 | 20 | 380 |
| 5.0E+08 | ~1.1E7 | 30 | 10 | 290 |
| 1.5E+08 | ~1.7E7 | 40 | 10 | 390 |

TABLE 4
Data Entry Table 1
Viability and Cell Count Calculations

Number of squares counted (A)
Number of viable cells (B)
Number of dead cells (C)
Total Number of cells (B + C) = D
Viability of cells (%) (B/D × 100
Viable Cell Concentration
(cells/mL),
E = (B/A) × Dilution factor × 10⁴
Total number of viable cells
E × 10 mL = F

[0377] Gram Stain of Cell Suspension in Wash

[0378] Obtain a sterile 2 mL cryovial and affix the Gram Stain label (Label 3). Transfer 400 uL of wash buffer into this vial. Transfer 20 uL from tube “B” to the vial labeled Gram Stain. Place sample in a sterile bag and place on ice.

[0379] Final Product Formulation

[0380] Centrifuge tube “B” (for the 3^{rd} wash) at 4° C. for 10 minutes at 1500 rpm. After centrifugation, carefully collect the supernatant into the tube labeled “Wash #3”. This supernatant will be used for Endotoxin testing.

[0381] Using a 2 mL pipette, transfer 2 mL of PFCNS+2% HSA (diluent) to gently resuspend the cell pellet. Draw up the entire content of the tube to measure the volume of cell suspension and record Volume of cell suspension measured (mL), G in Table 6. Complete calculations in Table 6 based on values calculated in Table 4. To achieve desired cell concentration for patient dose level (Table 5), add volume of diluent as calculated to tube B. Transfer entire product to the 4 mL cryovial.

TABLE 5

| Patient | | Cell |
|---|---|---|
| Dose | Clinical | Concentration |
| Level | Dose | (cells/mL) |
| 1 | 5.00E+07 | 1.67E+07 |
| 2 | 1.00E+08 | 3.33E+07 |
| | 1.50E+08 | 5.00E+07 |

TABLE 6
Data Entry Table 2
Data Entry Table 2

Total number of viable cells from Data Entry Table 1, F
Volume of cell suspension measured (mL), G
Cell Concentration of patient dose level, H
Final volume required to achieve cell concentration for
patient dose level (F/H) = I
Volume of diluent to be added I − G = J

[0382] Bactec and Fungal Sample

[0383] Obtain a sterile 4 mL vial and transfer 3 mL from the tube labeled Wash #1 to this tube. Place sample in sterile bag and place on ice. This sample will be used for product prep for STAT testing.

[0384] Endotoxin Determination

[0385] Obtain a sterile 2 mL cryovial and label Endotoxin. Transfer 450 uL of wash buffer into this vial. Transfer 50 uL from Wash #3 to the vial labled Endotoxin. Place sample in a sterile bag and place on ice. This sample will be used for product prep for STAT testing.

### REFERENCES

[0386] 1. Jemal, A., et al., Cancer statistics, 2008. CA Cancer J Clin, 2008. 58(2): p. 71-96.
[0387] 2. Li, S., et al., Oncolytic virotherapy for ovarian cancer. Oncolytic Virother, 2012. 1: p. 1-21.
[0388] 3. Cannistra, S. A., Cancer of the Ovary. New England Journal of Medicine, 2004. 351(24): p. 2519-2529.
[0389] 4. Kim, J., et al., Stem Cell-Based Cell Carrier for Targeted Oncolytic Virotherapy: Translational Opportunity and Open Questions. Viruses, 2015. 7(12): p. 6200-17.
[0390] 5. Ding, J., Oncolytic virus as a cancer stem cell killer: progress and challenges. Stem Cell Investigation, 2014. 1(12).
[0391] 6. Mader, E. K., et al., Mesenchymal stem cell carriers protect oncolytic measles viruses from antibody neutralization in an orthotopic ovarian cancer therapy model. Clin Cancer Res, 2009. 15(23): p. 7246-55.
[0392] 7. Hartkopf, A. D., et al., Oncolytic Viruses to Treat Ovarian Cancer Patients—a Review of Results From Clinical Trials. Geburtshilfe Frauenheilkd, 2012. 72(2): p. 132-136.
[0393] 8. Ahmed, A. U., et al., A preclinical evaluation of neural stem cell-based cell carrier for targeted antiglioma oncolytic virotherapy. J Natl Cancer Inst, 2013. 105(13): p. 968-77.
[0394] 9. Heise, C., et al., Efficacy of a replication-selective adenovirus against ovarian carcinomatosis is dependent on tumor burden, viral replication and p53 status. Gene Ther, 2000. 7(22): p. 1925-9.
[0395] 10. Lv, Y.-G., et al., The role of survivin in diagnosis, prognosis and treatment of breast cancer. Journal of Thoracic Disease, 2010. 2(2): p. 100-110.
[0396] 11. Falleni, M., et al., Survivin gene expression in early-stage non-small cell lung cancer. J Pathol, 2003. 200(5): p. 620-6.
[0397] 12. Lv, S., et al., The Impact of Survivin on Prognosis and Clinicopathology of Glioma Patients: A Systematic Meta-Analysis. Molecular Neurobiology, 2015. 51(3): p. 1462-1467.
[0398] 13. Armstrong, D. K., et al., Intraperitoneal Cisplatin and Paclitaxel in Ovarian Cancer. New England Journal of Medicine, 2006. 354(1): p. 34-43.
[0399] 14. Sun, V., et al., Toxicities, complications, and clinical encounters during intraperitoneal chemotherapy in 17 women with ovarian cancer. Eur J Oncol Nurs, 2013. 17(3): p. 375-80.
[0400] 15. Roulstone, V., et al., Phase I Trial of Cyclophosphamide as an Immune Modulator for Optimizing Oncolytic Reovirus Delivery to Solid Tumors. Clinical cancer research: an official journal of the American Association for Cancer Research, 2015. 21(6): p. 1305-1312.
[0401] 16. Bucheit, A. D., et al., An oncolytic measles virus engineered to enter cells through the CD20 antigen. Mol Ther, 2003. 7(1): p. 62-72.
[0402] 17. Eto, Y., et al., Development of PEGylated adenovirus vector with targeting ligand. Int J Pharm, 2008. 354(1-2): p. 3-8.
[0403] 18. Cole, C., et al., Tumor-targeted, systemic delivery of therapeutic viral vectors using hitchhiking on antigen-specific T cells. Nat Med, 2005. 11(10): p. 1073-81.
[0404] 19. Power, A. T. and J. C. Bell, Taming the Trojan horse: optimizing dynamic carrier cell/oncolytic virus systems for cancer biotherapy. Gene Ther, 2008. 15(10): p. 772-779.
[0405] 20. Aboody, K. S., et al., Neural stem cell-mediated enzyme/prodrug therapy for glioma: preclinical studies. Sci Transl Med, 2013. 5(184): p. 184ra59.
[0406] 21. Otsuka, S. and Bebb, G., The CXCR4/SDF-1 chemokine receptor axis: a new target therapeutic for non-small cell lung carcinoma. J Thorac Oncol., 2008 December; 3(12):1379-83
[0407] 22. Bagó, J. R., Alfonso-Pecchio, A., Okolie, O., Dumitru, R., Rinkenbaugh, A., Baldwin, A. S., Miller, C. R., Magness, S. T., Hingtgen, S. D., Therapeutically engineered induced neural stem cells are tumour-homing and inhibit progression of glioblastoma. Nat Commun. 2016 Feb. 2; 7:10593
[0408] 23. Mansfield, D. C., et al., Oncolytic vaccinia virus as a vector for therapeutic sodium iodide symporter gene therapy in prostate cancer. Gene Ther, 2016. 23(4): p. 357-68.
[0409] 24. Parato, K. A., et al., The oncolytic poxvirus JX-594 selectively replicates in and destroys cancer cells driven by genetic pathways commonly activated in cancers. Mol Ther, 2012. 20(4): p. 749-58.
[0410] 25. Matveeva, O. V., et al., Oncolysis by paramyxoviruses: multiple mechanisms contribute to therapeutic efficiency. Mol Ther Oncolytics, 2015. 2.
[0411] 26. Liu, Z., et al., Rational combination of oncolytic vaccinia virus and PD-L1 blockade works synergistically to enhance therapeutic efficacy. Nat Commun, 2017. 8: p. 14754.
[0412] 27. Hoff, C. M. a. M., Peter J., Technological Advances in Peritoneal Dialysis Research. International Society for Peritoneal Dialysis, 2006. 26: p. 547-558.
[0413] 28. Hoff, C. M. and T. R. Shockley, Peritoneal dialysis in the 21st century: the potential of gene therapy. J Am Soc Nephrol, 2002. 13 Suppl 1: p. S117-24.
[0414] 29. Mader, E. K., et al., Mesenchymal stem cell carriers protect oncolytic measles viruses from antibody neutralization in an orthotopic ovarian cancer therapy model. Clinical cancer research, 2009. 15(23): p. 7246-7255.
[0415] 30. Mader, E. K., et al., Optimizing patient derived mesenchymal stem cells as virus carriers for a phase I clinical trial in ovarian cancer. J Transl Med, 2013. 11: p. 20.
[0416] 31. Power, A. T., et al., Carrier cell-based delivery of an oncolytic virus circumvents antiviral immunity. Mol Ther, 2007. 15(1): p. 123-30.
[0417] 32. Portnow, J., et al., Neural Stem Cell-Based Anticancer Gene Therapy: A First-in-Human Study in Recurrent High-Grade Glioma Patients. Clin Cancer Res, 2017. 23(12): p. 2951-2960.
[0418] 33. Morshed, R. A., et al. Analysis of glioblastoma tumor coverage by oncolytic virus-loaded neural stem cells using MRI-based tracking and histological reconstruction. Cancer Gene Ther. 2015 January; 22(1):55-61.
[0419] 34. Metz, M. Z., et al., Neural stem cell-mediated delivery of irinotecan-activating carboxylesterases to glioma: implications for clinical use. Stem Cells Transl Med, 2013. 2(12): p. 983-92.
[0420] 35. Cao, P., et al., Intraperitoneal Administration of Neural Stem Cell-Nanoparticle Conjugates Targets Chemotherapy to Ovarian Tumors. Bioconjug Chem, 2017. 28(6): p. 1767-1776.
[0421] 36. Wang, J., et al., Thymidine kinase 1 expression in ovarian serous adenocarcinoma is superior to Ki-67: A new prognostic biomarker. Tumour Biol, 2017. 39(6): p. 1010428317706479.
[0422] 37. Aboody, K. S., et al., Neural stem cells display extensive tropism for pathology in adult brain: evidence from intracranial gliomas. Proc Natl Acad Sci USA, 2000. 97(23): p. 12846-51.
[0423] 38. Brown, A. B., et al., Intravascular delivery of neural stem cell lines to target intracranial and extracranial tumors of neural and non-neural origin. Hum Gene Ther, 2003. 14(18): p. 1777-85.
[0424] 39. Zhao, D., et al., Human neural stem cell tropism to metastatic breast cancer. Stem Cells, 2012. 30(2): p. 314-25.
[0425] 40. Danks, M. K., et al., Tumor-targeted enzyme/prodrug therapy mediates long-term disease-free survival of mice bearing disseminated neuroblastoma. Cancer Res, 2007. 67(1): p. 22-5.
[0426] 41. Ruf, B. and U. M. Lauer, Assessment of current virotherapeutic application schemes: “hit hard and early” versus “killing softly”? Molecular Therapy Oncolytics, 2015. 2: p. 15018.
[0427] 42. Prestwich, R. J., et al., Oncolytic Viruses: Do They Have a Role in Anti-Cancer Therapy? Clinical Medicine. Oncology, 2008. 2: p. 83-96.
[0428] 43. Aghi, M. and R. L. Martuza, Oncolytic viral therapies—the clinical experience. Oncogene, 2005. 24(52): p. 7802-16.
[0429] 44. Laudanski, K., et al., Potential Pitfalls of the Humanized Mice in Modeling Sepsis. Int J Inflam, 2018. 2018: p. 6563454.
[0430] 45. Dawidczyk, C. M., et al., State-of-the-art in design rules for drug delivery platforms: lessons learned from FDA-approved nanomedicines. J Control Release, 2014. 187: p. 133-44.
[0431] 46. Rink, J. S., et al., Update on current and potential nanoparticle cancer therapies. Curr Opin Oncol, 2013. 25(6): p. 646-51.
[0432] 47. Pattni, B. S., V. V. Chupin, and V. P. Torchilin, New Developments in Liposomal Drug Delivery. Chem Rev, 2015. 115(19): p. 10938-66.
[0433] 48. Allen, T. M. and P. R. Cullis, Liposomal drug delivery systems: from concept to clinical applications. Adv Drug Deliv Rev, 2013. 65(1): p. 36-48.
[0434] 49. Elsabahy, M. and K. L. Wooley, Design of polymeric nanoparticles for biomedical delivery applications. Chem Soc Rev, 2012. 41(7): p. 2545-61.
[0435] 50. Wang, A. Z., R. Langer, and O. C. Farokhzad, Nanoparticle delivery of cancer drugs. Annu Rev Med, 2012. 63: p. 185-98.
[0436] 51. Hong, R. L., et al., Direct comparison of liposomal doxorubicin with or without polyethylene glycol coating in C-26 tumor-bearing mice: is surface coating with polyethylene glycol beneficial? Clin Cancer Res, 1999. 5(11): p. 3645-52.
[0437] 52. Armstrong, J. K., et al., Antibody against poly(ethylene glycol) adversely affects PEG-asparaginase therapy in acute lymphoblastic leukemia patients. Cancer, 2007. 110(1): p. 103-11.
[0438] 53. Vabbilisetty, P. and X. L. Sun, Liposome surface functionalization based on different anchoring lipids via Staudinger ligation. Org Biomol Chem, 2014. 12(8): p. 1237-44.
[0439] 54. Ruf, B. and U. M. Lauer, Assessment of current virotherapeutic application schemes: “hit hard and early” versus “killing softly”? Molecular Therapy—Oncolytics, 2015. 2: p. 15018.
[0440] 55. Parato, K. A., et al., Recent progress in the battle between oncolytic viruses and tumours. Nat Rev Cancer, 2005. 5(12): p. 965-76.
[0441] 56. Tsai, H. F., et al., Candida glabrata erg1 mutant with increased sensitivity to azoles and to low oxygen tension. Antimicrob Agents Chemother, 2004. 48(7): p. 2483-9.
[0442] 57. Tsai, F. C., et al., A polarized Ca2+, diacylglycerol and STIM1 signalling system regulates directed cell migration. Nat Cell Biol, 2014. 16(2): p. 133-44.
[0443] 58. Chen, Y., et al., Pre-existent adenovirus antibody inhibits systemic toxicity and antitumor activity of CN706 in the nude mouse LNCaP xenograft model: implications and proposals for human therapy. Hum Gene Ther, 2000. 11(11): p. 1553-67.
[0444] 59. Casey, S. C., Tong, L., Li, Y., Do, R., Walz, S., Fitzgerald, K. N., Gouw, A., Baylot, V., Guetegemann, I., Eilers, M., & Felsher, D. W. (2016). MYC regulates the antitumor immune response through CD47 and PD-L1. Science.
[0445] 60. Duraiswamy, J., Kaluza, K. M., Freeman, G. J., & Coukos, G. (2013). Dual Blockade of PD-1 and CTLA-4 Combined with Tumor Vaccine Effectively Restores T Cell Rejection Function in Tumors. Cancer Res, 73(12), 3591-603.
[0446] 61. Gaillard, S. L., Secord, A. A., & Monk, B. (2016). The role of immune checkpoint inhibition in the treatment of ovarian cancer. Gynecologic Oncology Research and Practice, 3, 11.
[0447] 62. Kong, Y.-c.M., & Flynn, J. C. (2014). Opportunistic Autoimmune Disorders Potentiated by Immune-Checkpoint Inhibitors Anti-CTLA-4 and Anti-PD-1. Frontiers in Immunology, 5, 206.
[0448] 63. Willingham, S. B., Volkmer, J.-P., Gentles, A. J., Sahoo, D., Dalerba, P., Mitra, S. S., Wang, J., Contreras-Trujillo, H., Martin, R., Cohen, J. D., Lovelace, P., Scheeren, F. A., Chao, M. P., Weiskopf, K., Tang, C., Volkmer, A. K., Naik, T. J., Storm, T. A., Mosley, A. R., Edris, B., Schmid, S. M., Sun, C. K., Chua, M.-S., Murillo, O., Rajendran, P., Cha, A. C., Chin, R. K., Kim, D., Adorno, M., Raveh, T., Tseng, D., Jaiswal, S., Enger, P. O., Steinberg, G. K., Li, G., So, S. K., Majeti, R., Harsh, G. R., van de Rijn, M., Teng, N. N. H., Sunwoo, J. B., Alizadeh, A. A., Clarke, M. F., & Weissman, I. L. (2012). The CD47-signal regulatory protein alpha (SIRPa) interaction is a therapeutic target for human solid tumors. Proc Natl Acad Sci USA, 109(17), 6662-7.
[0449] 64. Chen, L., & Han, X. (2015). Anti-PD-1/PD-L1 therapy of human cancer: past, present, and future. J Clin Invest, 125(9), 3384-91.
[0450] 65. Sah, N. K., Khan, Z., Khan, G. J., & Bisen, P. S. (2006). Structural, functional and therapeutic biology of survivin. Cancer Lett, 244(2), 164-71.
[0451] 66. Liguang, Z., Peishu, L., Hongluan, M., Hong, J., Rong, W., Wachtel, M. S., & Frezza, E. E. (2007). Survivin expression in ovarian cancer. Exp Oncol, 29(2), 121-5.
[0452] 67. Pesonen, S., Kangasniemi, L., & Hemminki, A. (2011). Oncolytic adenoviruses for the treatment of human cancer: focus on translational and clinical data. Mol Pharm, 8(1), 12-28.
[0453] 68. Shinoura, N., Yoshida, Y., Tsunoda, R., Ohashi, M., Zhang, W., Asai, A., Kirino, T., & Hamada, H. (1999). Highly augmented cytopathic effect of a fiber-mutant E1B-defective adenovirus for gene therapy of gliomas. Cancer Res, 59(14), 3411-6.
[0454] 69. Vasey, P. A., Shulman, L. N., Campos, S., Davis, J., Gore, M., Johnston, S., Kirn, D. H., O'Neill, V., Siddiqui, N., Seiden, M. V., & Kaye, S. B. (2002). Phase I trial of intraperitoneal injection of the E1B-55-kd-gene-deleted adenovirus ONYX-015 (d11520) given on days 1 through 5 every 3 weeks in patients with recurrent/refractory epithelial ovarian cancer. J Clin Oncol, 20(6), 1562-9.
[0455] 70. Douglas, J. T., Kim, M., Sumerel, L. A., Carey, D. E., & Curiel, D. T. (2001). Efficient oncolysis by a replicating adenovirus (ad) in vivo is critically dependent on tumor expression of primary ad receptors. Cancer Res, 61(3), 813-7.
[0456] 71. Ulasov, I. V., Zhu, Z. B., Tyler, M. A., Han, Y., Rivera, A. A., Khramtsov, A., Curiel, D. T., & Lesniak, M. S. (2007). Survivin-driven and fiber-modified oncolytic adenovirus exhibits potent antitumor activity in established intracranial glioma. Hum Gene Ther, 18(7), 589-602.
[0457] 72. Mittal, A. K., Chaturvedi, N. K., Rohlfsen, R. A., Gupta, P., Joshi, A. D., Hegde, G. V., Bociek, R. G., & Joshi, S. S. (2013). Role of CTLA4 in the Proliferation and Survival of Chronic Lymphocytic Leukemia. PLoS One, 8(8), e70352.
[0458] 73. Okazaki, T., & Honjo, T. (2007). PD-1 and PD-1 ligands: from discovery to clinical application. Int Immunol, 19(7), 813-24.
[0459] 74. Zitvogel, L., & Kroemer, G. (2012). Targeting PD-1/PD-L1 interactions for cancer immunotherapy. Oncoimmunology, 1(8), 1223-5.
[0460] 75. Ansari, M. J. I., Salama, A. D., Chitnis, T., Smith, R. N., Yagita, H., Akiba, H., Yamazaki, T., Azuma, M., Iwai, H., Khoury, S. J., Auchincloss, H., & Sayegh, M. H. (2003). The Programmed Death-1 (PD-1) Pathway Regulates Autoimmune Diabetes in Nonobese Diabetic (NOD) Mice. J Exp Med, 198(1), 63-9.
[0461] 76. Joshi, M. N., Whitelaw, B. C., Palomar, M. T., Wu, Y., & Carroll, P. V. (2016). Immune checkpoint inhibitor-related hypophysitis and endocrine dysfunction: clinical review. Clin Endocrinol (Oxf), 85(3), 331-9.
[0462] 77. Nayerossadat, N., Maedeh, T., & Ali, P. A. (2012). Viral and nonviral delivery systems for gene delivery. Advanced Biomedical Research, 1, 27.
[0463] 78. Nwanegbo, E., Vardas, E., Gao, W., Whittle, H., Sun, H., Rowe, D., Robbins, P. D., & Gambotto, A. (2004). Prevalence of neutralizing antibodies to adenoviral serotypes 5 and 35 in the adult populations of The Gambia, South Africa, and the United States. Clin Diagn Lab Immunol, 11(2), 351-7.
[0464] 79. Mader, E. K., Butler, G., Dowdy, S. C., Mariani, A., Knutson, K. L., Federspiel, M. J., Russell, S. J., Galanis, E., Dietz, A. B., & Peng, K. W. (2013). Optimizing patient derived mesenchymal stem cells as virus carriers for a phase I clinical trial in ovarian cancer. J Transl Med, 11, 20.
[0465] 80. Mickelson, E. M., Longton, G., Anasetti, C., Petersdorf, E., Martin, P., Guthrie, L. A., & Hansen, J. A. (1996). Evaluation of the mixed lymphocyte culture (MLC) assay as a method for selecting unrelated donors for marrow transplantation. Tissue Antigens, 47(1), 27-36.
[0466] 81. Power, A. T., Wang, J., Falls, T. J., Paterson, J. M., Parato, K. A., Lichty, B. D., Stojdl, D. F., Forsyth, P. A., Atkins, H., & Bell, J. C. (2007). Carrier cell-based delivery of an oncolytic virus circumvents antiviral immunity. Mol Ther, 15(1), 123-30.
[0467] 82. Zhu, Z. B., Makhija, S. K., Lu, B., Wang, M., Kaliberova, L., Liu, B., Rivera, A. A., Nettelbeck, D. M., Mahasreshti, P. J., Leath, C. A., Barker, S., Yamaoto, M., Li, F., Alvarez, R. D., & Curiel, D. T. (2004). Transcriptional targeting of tumors with a novel tumor-specific survivin promoter. Cancer Gene Ther, 11(4), 256-62.
[0468] 83. Minev, B., Kohrt, H., Kilinc, M., Chen, N., Feng, A., Pessian, M., Geissinger, U., Haefner, E., Tsoneva, D., Bozhilov, K., Sagiv-Barfi, I., Zhao, X., Rajesekaran, N., Levy, R., & Szalay, A. (2014). Combination immunotherapy with oncolytic vaccinia virus and checkpoint inhibitor following local tumor irradiation. Journal for Immunotherapy of Cancer, 2(Suppl 3), P112-P.
[0469] 84. Zamarin, D., Holmgaard, R. B., Subudhi, S. K., Park, J. S., Mansour, M., Palese, P., Merghoub, T., Wolchok, J. D., & Allison, J. P. (2014). Localized oncolytic virotherapy overcomes systemic tumor resistance to immune checkpoint blockade immunotherapy. Science translational medicine, 6(226), 226ra32-ra32.
[0470] 85. Leng, S. X., McElhaney, J. E., Walston, J. D., Xie, D., Fedarko, N. S., & Kuchel, G. A. (2008). ELISA AND MULTIPLEX TECHNOLOGIES FOR CYTOKINE MEASUREMENT IN INFLAMMATION AND AGING RESEARCH. The journals of gerontology Series A, Biological sciences and medical sciences, 63(8), 879-84.
[0471] 86. He, T.-C., Zhou, S., da Costa, L. T., Yu, J., Kinzler, K. W., & Vogelstein, B. (1998). A simplified system for generating recombinant adenoviruses. Proc Natl Acad Sci USA, 95(5), 2509-14.
[0472] 87. Mizugaki, H., Yamamoto, N., Murakami, H., Kenmotsu, H., Fujiwara, Y., Ishida, Y., Kawakami, T., & Takahashi, T. (2016). Phase I dose-finding study of monotherapy with atezolizumab, an engineered immunoglobulin monoclonal antibody targeting PD-L1, in Japanese patients with advanced solid tumors. Invest New Drugs, 34(5), 596-603.
[0473] 88. Kojima, Y., Volkmer, J.-P., McKenna, K., Civelek, M., Lusis, A. J., Miller, C. L., Direnzo, D., Nanda, V., Ye, J., Connolly, A. J., Schadt, E. E., Quertermous, T., Betancur, P., Maegdefessel, L., Matic, L. P., Hedin, U., Weissman, I. L., & Leeper, N. J. (2016). CD47-blocking antibodies restore phagocytosis and prevent atherosclerosis. Nature, 536(7614), 86-90.
[0474] 89. Hulin-Curtis, S. L., Uusi-Kerttula, H., Jones, R., Hanna, L., Chester, J. D., & Parker, A. L. (2016). Evaluation of CD46 re-targeted adenoviral vectors for clinical ovarian cancer intraperitoneal therapy. Cancer Gene Ther, 23(7), 229-34.
[0475] 90. Cao et al., Intraperitoneal Administration of Neural Stem Cell—Nanoparticle Conjugates Targets Chemotherapy to Ovarian Tumors, Bioconjugate Chem., 2017, 28 (6), pp 1767-1776
[0476] 91. Mansfield et al., Oncolytic vaccinia virus as a vector for therapeutic sodium iodide symporter gene therapy in prostate cancer, Gene Therapy volume23, pages357-368 (2016)
[0477] 92. Ahmed, A. U., et al., Neural stem cell-based cell carriers enhance therapeutic efficacy of an oncolytic adenovirus in an orthotopic mouse model of human glioblastoma. Mol Ther, 2011.19(9): p. 1714-26.
[0478] 93. Wang et al., Enhancing Expression of Functional Human Sodium Iodide Symporter and Somatostatin Receptor in Recombinant Oncolytic Vaccinia Virus for In Vivo Imaging of Tumors, J Nucl Med Feb. 1, 2017 vol. 58 no. 2 221-227.
[0479] 94. Haddad, et al., Genetically Engineered Vaccinia Viruses As Agents for Cancer Treatment, Imaging, and Transgene Delivery, Front. Oncol., 23 May 2017.
[0480] 95. Li Z., Oganesyan D., Mooney R., Rong X., Christensen M. J., Shahmanyan D., Perrigue P. M., Benetatos J., Tsaturyan L., Aramburo S., Annala A. J., Lu Y., Najbauer J., Wu X., Barish M. E., Brody D. L., Aboody K. S., Gutova M. L-MYC expression maintains self-renewal and prolongs multipotency of primary human neural stem cells. Stem Cell Reports 7:483-495(2016).
[0481] 96. Mooney, R., Majid, A. A., Batalla-Covello, J., Machado, D., Lui, X., Gonzaga, J., Tirughana, R., Hammad, M, Dellinger, T. H., Lesniak, M. S., Curiel, D. T. Aboody, K. S. Enhanced Delivery of Oncolytic Adenovirus by Neural Stem Cells for Treatment of Metastatic Ovarian Cancer. Mol Ther Oncolytics 12:79-92(2019).

### P1 EMBODIMENTS

### P1 Embodiment 1

[0482] A method of treating cancer, including administrating to a subject a therapeutically effective amount of neural stem cells (NSCs) and a replication-competent oncolytic virus.

### P1 Embodiment 2

[0483] The method of P1 embodiment 1, wherein virus is conditionally replication-competent chimeric orthopoxvirus CF33.

### P1 Embodiment 3

[0484] The method of P1 embodiment 1, further comprising administering anti-PD-L1, CTLA4 or OX40.

### P1 Embodiment 4

[0485] The method of P1 embodiment 1, wherein the cancer is peritoneal cancer selected from the group consisting of ovarian cancer, pancreatic cancer, colorectal cancer, gastric cancer, and liver cancer.

### P1 Embodiment 5

[0486] The method of P1 embodiment 1, wherein the cancer is metastatic ovarian cancer.

### P1 Embodiment 6

[0487] The method of P1 embodiment 1, wherein the NSCs are

[0488] HB1.F3.CD21.

### P1 Embodiment 7

[0489] The method of P1 embodiment 1, wherein the administration is by injection.

### P1 Embodiment 8

[0490] The method of P1 embodiment 1, wherein the administration is by intraperitoneal (IP) injection.

### P1 Embodiment 9

[0491] A pharmaceutical composition for treating cancer comprising a therapeutically effective amount of neural stem cells (NSCs) and a replication-competent oncolytic virus.

### P1 Embodiment 10

[0492] The pharmaceutical composition of P1 embodiment 9, wherein virus is conditionally replication-competent chimeric orthopoxvirus CF33.

### P1 Embodiment 11

[0493] The pharmaceutical composition of P1 embodiment 9, further comprising anti-PD-L1, CTLA4 or OX40.

### P1 Embodiment 12

[0494] The pharmaceutical composition of P1 embodiment 9, wherein the cancer is peritoneal cancer selected from the group consisting of ovarian cancer, pancreatic cancer, colorectal cancer, gastric cancer, and liver cancer.

### P1 Embodiment 13

[0495] The pharmaceutical composition of P1 embodiment 9, wherein the cancer is metastatic ovarian cancer

### P1 Embodiment 14

[0496] The pharmaceutical composition of P1 embodiment 9, wherein the NSCs are HB1.F3.CD21

### P2 EMBODIMENTS

### P2 Embodiment 1

[0497] A method of treating cancer, said method comprising administering to a subject in need thereof an effective amount of a chimeric poxvirus and a neural stem cell (NSC).

### P2 Embodiment 2

[0498] The method of P2 embodiment 1, wherein said chimeric poxvirus forms part of said NSC.

### P2 Embodiment 3

[0499] The method of P2 embodiment 2, wherein said NSC is administered intraperitonally.

### P2 Embodiment 4

[0500] The method of P2 embodiment 2, wherein said NSC is administered at a cell number of 1×10⁸ to 2×10⁸ cells.

### P2 Embodiment 5

[0501] The method of P2 embodiment 2, wherein said NSC is administered at a cell number of 1.5×10⁸ cells.

### P2 Embodiment 6

[0502] The method of claim 2, wherein said NSC is administered at a cell number of 5×10⁶ to 5×10⁷ cells/mL.

### P2 Embodiment 7

[0503] The method of any one of P2 embodiments 1 to 6, wherein said poxvirus is encoded by a nucleic acid sequence having a sequence identity of at least 70% to SEQ ID NO:1.

### P2 Embodiment 8

[0504] The method of P2 embodiment 7, wherein said nucleic acid sequence comprises nucleic acid fragments from at least two poxvirus strains selected from the group consisting of cowpox virus strain Brighton, raccoonpox virus strain Herman, rabbitpox virus strain Utrecht, vaccinia virus strain WR, vaccinia virus strain IHD, vaccinia virus strain Elstree, vaccinia virus strain CL, vaccinia virus strain Lederle-Chorioallantoic, vaccinia virus strain AS, orf virus strain NZ2 and pseudocowpox virus strain TJS.

### P2 Embodiment 9

[0505] The method of P2 embodiment 7 or 8, wherein said nucleic acid sequence comprises nucleic acid fragments from cowpox virus strain Brighton, raccoonpox virus strain Herman, rabbitpox virus strain Utrecht, vaccinia virus strain WR, vaccinia virus strain IHD, vaccinia virus strain Elstree, vaccinia virus strain CL, vaccinia virus strain Lederle-Chorioallantoic and vaccinia virus strain AS.

### P2 Embodiment 10

[0506] The method of one of P2 embodiments 7-9, wherein said nucleic acid sequence further comprises one or more anti-cancer nucleic acid sequences or a detectable moiety-encoding nucleic acid sequence.

### P2 Embodiment 11

[0507] The method of one of P2 embodiments 1-10, wherein said chimeric poxvirus is a replication-competent chimeric poxvirus.

### P2 Embodiment 12

[0508] The method of one of P2 embodiments 1-11, wherein said NSC is a Human Leukocyte Antigen (HLA) II-negative NSC.

### P2 Embodiment 13

[0509] The method of one of P2 embodiments 1-12, wherein said NSC is an HB1.F3.CD21 cell.

### P2 Embodiment 14

[0510] The method of one of P2 embodiments 1-13, the method comprising further administering an effective amount of a therapeutic agent.

### P2 Embodiment 15

[0511] The method of P2 embodiment 14, wherein said therapeutic agent is an anti-cancer agent.

### P2 Embodiment 16

[0512] The method of P2 embodiment 14 or 15, wherein said therapeutic agent is selected from the group consisting of a small molecule, a nucleic acid, a polypeptide and an antibody.

### P2 Embodiment 17

[0513] The method of one of P2 embodiments 14-16, wherein said therapeutic agent is a PD-L1 inhibitor, a CTLA-4 inhibitor or an OX40 inhibitor.

### P2 Embodiment 18

[0514] The method of one of P2 embodiments 1-17, wherein said cancer is breast cancer, colon cancer, kidney cancer, leukemia, lung cancer, melanoma, ovarian cancer, prostate cancer, pancreatic cancer, brain cancer, liver cancer, gastric cancer or a sarcoma.

### P2 Embodiment 19

[0515] The method of P2 embodiment 18, wherein said ovarian cancer is an ovarian metastasis.

### P2 Embodiment 20

[0516] A composition comprising a chimeric poxvirus and a neural stem cell (NSC).

### P2 Embodiment 21

[0517] The composition of P2 embodiment 20, wherein said chimeric poxvirus forms part of said NSC.

### P2 Embodiment 22

[0518] The composition of P2 embodiment 20 or 21, wherein said poxvirus is encoded by a nucleic acid sequence having a sequence identity of at least 70% to SEQ ID NO:1.

### P2 Embodiment 23

[0519] The composition of P2 embodiment 22, wherein said nucleic acid sequence comprises nucleic acid fragments from at least two poxvirus strains selected from the group consisting of cowpox virus strain Brighton, raccoonpox virus strain Herman, rabbitpox virus strain Utrecht, vaccinia virus strain WR, vaccinia virus strain IHD, vaccinia virus strain Elstree, vaccinia virus strain CL, vaccinia virus strain Lederle-Chorioallantoic, vaccinia virus strain AS, orf virus strain NZ2 and pseudocowpox virus strain TJS.

### P2 Embodiment 24

[0520] The composition of P2 embodiment 23 or 23, wherein said nucleic acid sequence comprises nucleic acid fragments from cowpox virus strain Brighton, raccoonpox virus strain Herman, rabbitpox virus strain Utrecht, vaccinia virus strain WR, vaccinia virus strain IHD, vaccinia virus strain Elstree, vaccinia virus strain CL, vaccinia virus strain Lederle-Chorioallantoic and vaccinia virus strain AS.

### P2 Embodiment 25

[0521] The composition of one of P2 embodiment 22-24, wherein said nucleic acid sequence further comprises one or more anti-cancer nucleic acid sequences or a detectable moiety-encoding nucleic acid sequence.

### P2 Embodiment 26

[0522] The composition of one of P2 embodiments 20-25, wherein said chimeric poxvirus is a replication-competent chimeric poxvirus.

### P2 Embodiment 27

[0523] The composition of one of P2 embodiments 20-26, wherein said

[0524] NSC is a Human Leukocyte Antigen (HLA) II-negative NSC.

### P2 Embodiment 28

[0525] The composition of one of P2 embodiments 20-26, wherein said NSC is an HB1.F3.CD21 cell.

### P2 Embodiment 29

[0526] The composition of one of P2 embodiment 20-28, further comprising an effective amount of a therapeutic agent.

### P2 Embodiment 30

[0527] The composition of P2 embodiment 29, wherein said therapeutic agent is an anti-cancer agent.

### P2 Embodiment 31

[0528] The composition of P2 embodiment 29 or 30, wherein said therapeutic agent is a PD-L1 inhibitor, a CTLA-4 inhibitor or an OX40 inhibitor.

### P2 Embodiment 32

[0529] The composition of one of P2 embodiments 20-31, wherein said composition is effective to treat cancer.

### P2 Embodiment 33

[0530] The composition of P2 embodiment 32, wherein said cancer is breast cancer, colon cancer, kidney cancer, leukemia, lung cancer, melanoma, ovarian cancer, prostate cancer, pancreatic cancer, brain cancer, liver cancer, gastric cancer or a sarcoma.

### P2 Embodiment 34

[0531] The composition of P2 embodiment 33, wherein said ovarian cancer is an ovarian metastasis.

### P2 Embodiment 35

[0532] The composition of one of P2 embodiment 20-34, wherein said composition is a pharmaceutical composition.

### P2 Embodiment 36

[0533] The composition of P2 embodiment 35, wherein said pharmaceutical composition comprises a pharmaceutically acceptable excipient.

### P2 Embodiment 37

[0534] A neural stem cell (NSC) comprising a chimeric poxvirus.

### P2 Embodiment 38

[0535] The neural stem cell of P2 embodiment 37, wherein said poxvirus is encoded by a nucleic acid sequence having a sequence identity of at least 70% to SEQ ID NO:1.

### P2 Embodiment 39

[0536] The neural stem cell of P2 embodiment 38, wherein said nucleic acid sequence comprises nucleic acid fragments from at least two poxvirus strains selected from the group consisting of cowpox virus strain Brighton, raccoonpox virus strain Herman, rabbitpox virus strain Utrecht, vaccinia virus strain WR, vaccinia virus strain IHD, vaccinia virus strain Elstree, vaccinia virus strain CL, vaccinia virus strain Lederle-Chorioallantoic, vaccinia virus strain AS, orf virus strain NZ2 and pseudocowpox virus strain TJS.

### P2 Embodiment 40

[0537] The neural stem cell of P2 embodiment 38 or 39, wherein said nucleic acid sequence comprises nucleic acid fragments from cowpox virus strain Brighton, raccoonpox virus strain Herman, rabbitpox virus strain Utrecht, vaccinia virus strain WR, vaccinia virus strain IHD, vaccinia virus strain Elstree, vaccinia virus strain CL, vaccinia virus strain Lederle-Chorioallantoic and vaccinia virus strain AS.

### P2 Embodiment 41

[0538] The neural stem cell of one of P2 embodiments 38-40, wherein said nucleic acid sequence further comprises one or more anti-cancer nucleic acid sequences or a detectable moiety-encoding nucleic acid sequence.

### P2 Embodiment 42

[0539] The neural stem cell of one of P2 embodiments 37-41, wherein said chimeric poxvirus is a replication-competent chimeric poxvirus.

### P2 Embodiment 43

[0540] The neural stem cell of one of P2 embodiments 37-42, wherein said NSC is a Human Leukocyte Antigen (HLA) II-negative NSC.

### P2 Embodiment 44

[0541] The neural stem cell of one of P2 embodiments 37-43, wherein said NSC is an HB1.F3.CD21 cell

### P2 Embodiment 45

[0542] The neural stem cell of one of P2 embodiment 37-38, wherein said NSC forms part of a pharmaceutical composition.

### P2 Embodiment 46

[0543] The neural stem cell of P2 embodiment 44, wherein said pharmaceutical composition comprises a pharmaceutically acceptable excipient.

### P2 Embodiment 47

[0544] A method of treating cancer, said method comprising administering to a subject in need thereof an effective amount of a neural stem cell of one of embodiments 37-46.

### P2 Embodiment 48

[0545] The method of P2 embodiment 47, wherein said cancer is breast cancer, colon cancer, kidney cancer, leukemia, lung cancer, melanoma, ovarian cancer, prostate cancer, pancreatic cancer, brain cancer, liver cancer, gastric cancer or a sarcoma

### P2 Embodiment 49

[0546] The method of P2 embodiment 47 or 48, wherein said ovarian cancer is an ovarian metastasis.

What is claimed is:

1. A method of treating cancer, said method comprising administering to a subject in need thereof an effective amount of a chimeric poxvirus and a neural stem cell (NSC).

2. The method of claim 1, wherein said chimeric poxvirus forms part of said NSC.

3. The method of claim 2, wherein said NSC is administered intraperitonally.

4. The method of claim 2, wherein said NSC is administered at a cell number of 1×10⁸ to 2×10⁸ cells.

5. The method of claim 2, wherein said NSC is administered at a cell number of 1.5×10⁸ cells.

6. The method of claim 2, wherein said NSC is administered at a cell number of 5×10⁶ to 5×10⁷ cells/ml.

7. The method of claim 1, wherein said chimeric poxvirus is encoded by a nucleic acid sequence having a sequence identity of at least 70% to SEQ ID NO:1.

8. The method of claim 7, wherein said nucleic acid sequence comprises nucleic acid fragments from at least two poxvirus strains selected from the group consisting of cowpox virus strain Brighton, raccoonpox virus strain Herman, rabbitpox virus strain Utrecht, vaccinia virus strain WR, vaccinia virus strain IHD, vaccinia virus strain Elstree, vaccinia virus strain CL, vaccinia virus strain Lederle-Chorioallantoic, vaccinia virus strain AS, orf virus strain NZ2 and pseudocowpox virus strain TJS.

9. The method of claim 8, wherein said nucleic acid sequence comprises nucleic acid fragments from cowpox virus strain Brighton, raccoonpox virus strain Herman, rabbitpox virus strain Utrecht, vaccinia virus strain WR, vaccinia virus strain IHD, vaccinia virus strain Elstree, vaccinia virus strain CL, vaccinia virus strain Lederle-Chorioallantoic and vaccinia virus strain AS.

10. The method of claim 7, wherein said nucleic acid sequence further comprises one or more anti-cancer nucleic acid sequences or a detectable moiety-encoding nucleic acid sequence.

11. The method of claim 1, wherein said chimeric poxvirus is a replication-competent chimeric poxvirus.

12. The method of claim 1, wherein said NSC is a Human Leukocyte Antigen (HLA) II-negative NSC.

13. The method of claim 1, wherein said NSC is an HB1.F3.CD21 cell.

14. The method of claim 1, the method comprising further administering an effective amount of a therapeutic agent.

15. The method of claim 14, wherein said therapeutic agent is an anti-cancer agent.

16. The method of claim 14, wherein said therapeutic agent is selected from the group consisting of a small molecule, a nucleic acid, a polypeptide and an antibody.

17. The method of claim 14, wherein said therapeutic agent is a PD-L1 inhibitor, a CTLA-4 inhibitor or an OX40 inhibitor.

18. The method of claim 1, wherein said cancer is breast cancer, colon cancer, kidney cancer, leukemia, lung cancer, melanoma, ovarian cancer, prostate cancer, pancreatic cancer, brain cancer, liver cancer, gastric cancer or a sarcoma.

19. The method of claim 18, wherein said ovarian cancer is an ovarian metastasis.

20. A composition comprising a chimeric poxvirus and a neural stem cell (NSC).

21. The composition of claim 20, wherein said chimeric poxvirus forms part of said NSC.

22. The composition of claim 20, wherein said poxvirus is encoded by a nucleic acid sequence having a sequence identity of at least 70% to SEQ ID NO:1.

23. The composition of claim 22, wherein said nucleic acid sequence comprises nucleic acid fragments from at least two poxvirus strains selected from the group consisting of cowpox virus strain Brighton, raccoonpox virus strain Herman, rabbitpox virus strain Utrecht, vaccinia virus strain WR, vaccinia virus strain IHD, vaccinia virus strain Elstree, vaccinia virus strain CL, vaccinia virus strain Lederle-Chorioallantoic, vaccinia virus strain AS, orf virus strain NZ2 and pseudocowpox virus strain TJS.

24. The composition of claim 22, wherein said nucleic acid sequence comprises nucleic acid fragments from cowpox virus strain Brighton, raccoonpox virus strain Herman, rabbitpox virus strain Utrecht, vaccinia virus strain WR, vaccinia virus strain IHD, vaccinia virus strain Elstree, vaccinia virus strain CL, vaccinia virus strain Lederle-Chorioallantoic and vaccinia virus strain AS

25. The composition of claim 22, wherein said nucleic acid sequence further comprises one or more anti-cancer nucleic acid sequences or a detectable moiety-encoding nucleic acid sequence.

26. The composition of claim 20, wherein said chimeric poxvirus is a replication-competent chimeric poxvirus.

27. The composition of claim 20, wherein said NSC is a Human Leukocyte Antigen (HLA) II-negative NSC.

28. The composition of claim 20, wherein said NSC is an HB1.F3.CD21 cell.

29. The composition of claim 20, further comprising an effective amount of a therapeutic agent.

30. The composition of claim 29, wherein said therapeutic agent is an anti-cancer agent.

31. The composition of claim 29, wherein said therapeutic agent is a PD-L1 inhibitor, a CTLA-4 inhibitor or an OX40 inhibitor.

32. The composition of claim 20, wherein said composition is effective to treat cancer.

33. The composition of claim 32, wherein said cancer is breast cancer, colon cancer, kidney cancer, leukemia, lung cancer, melanoma, ovarian cancer, prostate cancer, pancreatic cancer, brain cancer, liver cancer, gastric cancer or a sarcoma.

34. The composition of claim 33, wherein said ovarian cancer is an ovarian metastasis.

35. The composition of claim 20, wherein said composition is a pharmaceutical composition.

36. The composition of claim 35, wherein said pharmaceutical composition comprises a pharmaceutically acceptable excipient.

37. A neural stem cell (NSC) comprising a chimeric poxvirus.

38. The neural stem cell of claim 37, wherein said poxvirus is encoded by a nucleic acid sequence having a sequence identity of at least 70% to SEQ ID NO:1.

39. The neural stem cell of claim 38, wherein said nucleic acid sequence comprises nucleic acid fragments from at least two poxvirus strains selected from the group consisting of cowpox virus strain Brighton, raccoonpox virus strain Herman, rabbitpox virus strain Utrecht, vaccinia virus strain WR, vaccinia virus strain IHD, vaccinia virus strain Elstree, vaccinia virus strain CL, vaccinia virus strain Lederle-Chorioallantoic, vaccinia virus strain AS, orf virus strain NZ2 and pseudocowpox virus strain TJS.

40. The neural stem cell of claim 38, wherein said nucleic acid sequence comprises nucleic acid fragments from cowpox virus strain Brighton, raccoonpox virus strain Herman, rabbitpox virus strain Utrecht, vaccinia virus strain WR, vaccinia virus strain IHD, vaccinia virus strain Elstree, vaccinia virus strain CL, vaccinia virus strain Lederle-Chorioallantoic and vaccinia virus strain AS.

41. The neural stem cell of claim 38, wherein said nucleic acid sequence further comprises one or more anti-cancer nucleic acid sequences or a detectable moiety-encoding nucleic acid sequence.

42. The neural stem cell of claim 37, wherein said chimeric poxvirus is a replication-competent chimeric poxvirus.

43. The neural stem cell of claim 37, wherein said NSC is a Human Leukocyte Antigen (HLA) II-negative NSC.

44. The neural stem cell of claim 37, wherein said NSC is an HB1.F3.CD21 cell.

45. The neural stem cell of claim 37, wherein said NSC forms part of a pharmaceutical composition.

46. The neural stem cell of claim 45, wherein said pharmaceutical composition comprises a pharmaceutically acceptable excipient.

47. A method of treating cancer, said method comprising administering to a subject in need thereof an effective amount of a neural stem cell of claim 37.

48. The method of claim 47, wherein said cancer is breast cancer, colon cancer, kidney cancer, leukemia, lung cancer, melanoma, ovarian cancer, prostate cancer, pancreatic cancer, brain cancer, liver cancer, gastric cancer or a sarcoma.

49. The method of claim 47, wherein said ovarian cancer is an ovarian metastasis.

The application's sequence listing, which the Patent Office published only in electronic form, follows.

SEQUENCE LISTING (20 sequences)

SEQ ID NO: 1 - DNA, 189415 bp, Artificial Sequence
  Synthetic Polynucleotide
gagaaagagataaaacttttttacgactccatcagaaagaggtttaatatttttgtgagaccatcgaagagagaaagagaaagagatagttagtctagatatttttcttagtacaaaagtcaatgttttaaaatatatggacaagaatttgtctgtataaaaacttgtgtgaaattttgtaccaaagaaaaaatgtgagcagtatcccctacatggattttactagatcatttatataccaaaaaatattatacgatctacgttttattatatgattttaacgtgtaaattataaacattattttatgatatacaattgtctggtaacctagatgggcataggggatgttgataagctcgacgagtatatgttgttggacgttattgtttaagaaatagttgatgcatcagaaagagaataaaaaatattttagtgagaccatcgaagagagaaagagataaaacttttttacgactccatcagaaagaggtttaatatttttgtgagaccatcgaagagagaaagagaataaaaatattttatgactccattgaagagagaaagagaaaatgagaatgagaataaaaatattttagtgacaccatcagaaagaggtttaatatttttgtgagaccatcgaagagagaaagagaataaaaatattttatgactccattgaagagagaaagagaaaatgagaatgagaataaaaatattttagtgacaccatcagaaagaggtttaatattttttatgagaccatcaaagagagaaagagaataaaaatatttttgtaaaactttttttatgagaccatcaaagagagaaagagaataaaaatatttttgtaaaactttttttatgagaccatcaaagagagaaagagaataaaaatatttttgtaaaactttttttatgagaccatcaaagagagaaagagaataaaaatatttttgtaaaactttttttatgagaccatcaaagagagaaagagaataaaaatatttttgtaaaactttttttatgagaccatcaaagagagaaagagaataaaaaaatatttttgtaaaactttttttatgagaccatcagaaagaggtttaatatttttgtgataccctgaaaggaaataggaataggaatagtgtcataatcgtatcacactattgagacagaaaaagaagaagtcgcgagaggtaactttttgttttgcaaaccggaatatagtgtccggtacacttttttaattcgtggtgtgcctgaatcgttcgattaaccctactcatccaatttcagatgaatagagttatcgattcagacacacgctttgagttttgttgaatcgatgagtgaagtatcatcggttgcaccttcagatgccgatccgtcgacatacttgacctcaagttcagatgattccttgcacatgtctccgatacgaacgctaaactctagattcttgacacattttgtatcgacgatcgttgaaccgatgatatcttcgtaactcactttcttatgagagatgttagacccgagtactggatgggtcttgatgtcgctgtctttctcttcttcgctacatctgatgtcgatagacacctcacagtctttccatcagcggattctgagatggatttaatctgaggacatttggtgaatccaaagttcattctcagacctccaccgatgatggagtaataagtggtaggaggatctacatcctcgactgattccacctcgggatctggatctgactcggactctgtaatttccgttacggattggcaaatcttatcatcggtcggtgtttggtcttgctttgtgactttgataataacatcgattcccatatgatgtttgttttcttcttccgtacacgatgaggatgattgctgaagactggcaggcacatgcatgccagtacgatatattgtttcatgattgctattgattgagtactgttctttatgattctacttccttaccgtgcaataaattagaatatattttctacttttacgagaaattaattattgtatttatgggtgaaaaacttactataaaaagcgggtgggtttggaattagtgatcagtttatgtatatcgcaactaccgggcatatggctacattacccacatgataagagattgtatcagtttcgtagtcttgagtattggtattactatatagtatatagatgtcgacgctagagttactgtctccgaatgcggcatgatagtatcattctttgctttcgttaactgtttggaggaagaatctttgttattgcatttaatctcgaaattcagagtgcacacctttctcctgtaaagaatcctgaagttgctaccttattaagaacggagaagtatccatcacgaaagacgggattacagtctttatgattcatagtaatagttagttccgacgttgagatggattcgctgagaccggtagtggtcgtccgagtacacgatgtgtcgttgacgggatacagattaatttccacatcgatatagttaaaggtatttctgggtacgggtttgagatcgtcgtacatgggaaatgaaatgtgactgtctgaatgtatggctttaagatagctgtgataccgtatacaggtcggtgtcggagattcgaatctctttaaggcgacttatgtcacgatgatggaatctatcttatcgaatgatatatttttcataaatacacttttatagtcctcgtttaaacagaatttactatgtagttccgcgaatgactcgtcccttaataggcagtaggctagtatcttttttacgtagtaatcgtcgtagggagagacatcttgtagaacaacgatttaatcataggtagagatactttcagtctgtggtggatgatgtcattcacaacatccgccttgtatatgatgtttctgttttcaaacaccaagtcgaataccgtctttagtcggaaggttgatgtcgtatccgatgtatgaggcaacattgttgttacaattttgaaaggcggtattatagtattcgtctttctgaatgtcgaacctatctagtagataccgtagtatattgagagtgtatccttgattatgttttatgaatagataaagtagatgttgtccttcttccttttgttcgtgccaattgagtaacattatgagaatatgacctgttgcacaatcgttccatgatgggtgtacaatcaagattattacgtatcctcgtatcggctcctcgagataaaagagcatacaccacacgaggactatgtttggtatactgttgaaggtaagtgtgtaaccgcgttaatgtttgctccataatctattatcgcgtagatgaatcgcttctcggctcgcatcttagtgtgacttaacttgtaataattgcttttgtagaacgtggatatgtgtttacagtagtaatgaagagaagtgagtccatcctcgtcgacgcaattagggtcggatcctttgtacagaacgtaatagtttaagctcccattgaatttatatctaagataacacagcaatagatcggatgatttactaaagtcatcaatggtgtccgttagtatatcaaagatcttgttatcgattgatagtgaatgaatcagatagtggtgtagaggaatatgtcctttttcatccttgctatcaaagttacgcatgccgtggtgtaacaatatctttaatacagatggattaaatcgtgtattcatcgtatagcaatgtaatggagagttacctcgtttattcagatcgcagtgtttaataactagcttaaacagatgagacgatgtatccacatcaaagaacgtaaaatacatatgacaaacattgttgacagaaacgtgaccttcattcttaccgtcgtccataaatacgttaggtatgtaccacatactgtcgcgaacgatgcgtacaatctcgtccatctcataatgatttactttttcataattaaagatgtgaaagaaaaacagaacaatatatttttttagtaatgtttatgcgagacatataaaataaactccgtgtttatgatcatttttaacagcaacacattcaatattgtattgttatttttatattatttacacaattaacaatatattattagtttatattactgaattaataatataaaattcccaatcttgtcataaacacacactgagaaacagcataaacacaaaatccatcaaaaatgtcgatgaaatatctgatgttgttgttcgctgctatgataatcagatcattcgccgatagtggtaacgctatcgaaacgacatcgccagaaattacaaacgctacaacagatattccagctatcagattatgcggtccagagggagatggatattgtttacacggtgactgtatccacgctagagatattgacggtatgtattgtagatgctctcatggttatacaggcattagatgtcagcatgtagtattagtagactatcaacgttcagaaaacccaaacactacaacgtcatatatcccatctcccggtattatgcttgtattagtaggcattattattattacgtgttgtctattatctgtttataggttcactcgacgaactaaactacctatacaagatatggttgtgccataatttttataaatttttttatgagtatttttacaaaaaaaatgtataaagtgtatgtcttatgtatatttataaaaatgctaagtatgcgatgtatctatgttatttgtatttatctaaacaatacctctacctctagatattatacaaaaattttttatttcggcatattaaagtaaaatctagttaccttgaaaatgaatacagtgggtggttccgtatcaccagtaagaacataatagtcgaatacagtatccgattgagattttgcatacaatactagtctagaaagaaatttgtaatcatcttctgtgacgggagtccatatatctgtatcatcgtctagtttatcagtgtcccatgctatattcctgttatcatcattagttaatgaaaataactctcgtgcttcagaaaagtcaaatattgtatccatacatacatctccaaaactatcgcttatacgtttatctttaacgatacctatacctagatggttatttactaacagacattttccagatctattgactataactcctatagtttccacatcaaccaagtaatgatcatctattgttatataacaataacataactcttttccatttttatcagtatgtatatctatatcaacgtcgtcgttgtagtgaatagtagtcattgatctattatatgaaacggatatgtctagaacggcaattgttttacgtccagttaacactttctttgatttaaagtctagagtctttgcaaacataatatccttatccgactttatatttcctgtagggtggtataattttattttgcctccacatatcggtgtttccaaatatattactagacaatattccatatagttattagttaagggtacccaattagaacacgtacgcttattatcatcatttggatcgtatttcataaaagttattgtactatcgatgtcaacacattctacattttttaatcgtctatatagtatttttctgatattttctataatatcagaattgtcttccatcggaagttgtatactatcggaatcagttacatgtttaaataattctctgatgtcattccttatacaatcaaattcattattaaacagtttaatagtctgtagacctttatcgtcgtaaatatccattgtcttattagttacgcttatttttatgtgttttacgttgctttattatattttataagaatgattgtttgacgaatcacgagaactattaagacacattattaggtatatattataaaaaagtttttgattacgatgttataagaggaaagaggacacattaacatcatacatcaattaactacattcttataacatcgtaatcaaaagaattgcaattttgatgtataacaactgtcaatgggttatggaattgtatattacatattatacggtatgttggtaacgacaaataccgatcggtaattgtctgccggtgtaatagaattatatatatctatctattacaccggctgagtatgcataataataagttgtggtagtatgatctccatatttataatttaggactttgtattcagtatttttggaatcataaaaaataaaaaaaagttttactaatttaaaatttaaaaagtatttacatttttttcactgtttagtcgcggatatggaattcgatcctgccaaaatcaatacatcatctatagatcatgtaacaatattacaatacatagatgaaccaaatgatataagactaacagtatgcattatccgaaatattaataacattacatattatatcaatatcacaaaaataaatacacatttggctaatcaatttcgggcttggaaaaaacgtatcgccggaagggactatatgactaacttatctagagatacaggaatacaacaatcaaaacttactgaaactatacgtaactgtcaaaaaaatagaaacatatatggtctatatatacactacaatttagttattaatgtggttattgattggataaccgatgtgattgttcaatcaatattaagagggttggtaaattggtacatagctaataatacctatactccaaatacacccaataatacaacaaccatttctgagttggatatcatcaaaatactggataaatacgaggacgtgtatagagtaagtaaagaaaaagaatgtggaatttgctatgaagttgtttactcaaaacgatagatactttggtttattggattcgtgtactcatatattttgcataacatgcatcaatatatggcataaaacacgaagagaaaccggtgcgtcggataattgtcctatatgtcgtacccgttttagaaacataacaatgagcaagttctataagctagttaactaataaataaaaagtttaatttgttgacgacgtatgtcgttatttttctcgtatgaaagattaaattcaattcaattcgttgtttctaatataatctgccgtattggatggattctcaagacaattgcatttagattatattatcatgaataaaaatagtagcacgcactacttcagccaaatattcttttttgaaacgccatctatcgtagtgaggacacaagtgaacctataattatcaaatttattagtatcagtcacatgaaggactttctgtagagtgacgattctaccatctatggtactaacggtttcatcctccttgataccctcacccaaatgttctataaatttagcatcctcgtccgatctcatatcctttgccaaccaatacatgtagctaaaattaggcataaatttcacacatccagtgcaacgaaattctccagaagatgttacgatgtttaggttaggacatttgatttcgtcggcattaacatatgggtgaacacacccatacatgaaagcgatgagaaataggattctcatcttgccaaaatatcactagaaaaaatttatttatcaattttaaaggtataaaaaatacttattgttgctcgaatattttgtatttgatggtatacggaagattagaaatgtaggtattatcatcaactgattctatggttttatgtattctatcatgtttcactattgcgtcggaaataatatcatatgcttccacatatattttattttgttttaactcataatactcacgtaattctggattattggcatatctatgaataattttagctccatgatcagtaaatattaatgagaacatagtattaccacctaccattatttttttcatttcgttcaattcttgattgcaaagatctatataatcattatagcgttgacttatggactctggaatcttagacgatgtacagtcatctataatcatggcatatttaatacattgttttatagcatagtagttatctacgatgttagatatttctctcaatgaatcaatcacacaatctaatgtaggtttatgacataatagcattttcagcagttcaatgtttctagattcgttgatggcaatggctatacatgtatatccgttatttgatctaatgttgacatctgaaccggattctagcagtaaagatactagagattgtttattatatctaacagccttgtgaagaagtgtttctcctcgtttgtcaatcatgttaatgtctttaagataaggtaggcaaatgtttatagtactaagaattgggcaagcataagacatgtcacaaagaccctttttgtatgtataagtgtaaaaattataacattcatagttggatttacataggtgtccaatcgggatctctccatcatcgagataattgatggcatctcccttccttttttagtagatatttcatcgtgtaagaatcaatattaatatttctaaagtattcgtgtatagcctctttatttaccacagttccatattccactagagggatatcgccgaatgtcatatactcaattagtatatgttggaggacatccgagttcattgttttcaatatcaaaaagatggtttccttatcatttctccatagtggtacaatactacacattattccgtgcggctttccattttccaaaaacaatttgaccaaatctaaatctacatctttattgtatctataatcactatttagataatcagccataattactcgagtgcaacatgttagatcgtctatatatgaataagcagtgttatctattcctttcattaacaatttaacgatgtctatatctatatgagatgacttaatataatattgaagagctgtacaatagtttttatctatagaagacggcttgattccgtgattaattagacatttaacaacttccggacgcacatatgctctcgtatccgactttgaatacagatgagagatgatatacagatgcaatacggtaccgcaatttcgtagttgataatcatcatacgcgtatcagtactcgtcctcataaagaacactgcagccattttctatgaacaaatcaataattttaggaacaggatcattgtcattacataattttctataactgaacgatggttttcacatttaacactcaagtcaaatccatgttctaccaacacctttatcaagtcaacgtctacatttttggatttcatatagctgaatatattaaagtcatttatgttgctaaatccagtggcttctagtagagccatcgctatatcctttaactttaacatgtctactatttgtgtattcttctaatggggtagctgtctccaatttttgcgtaatggattagtgccactgtctagtagtagtttgacgacctcgacattattacaatgctcattaaaaaggtatgcgtgtaaagcattattcttgaattggttcctggtatcattaggatctctgtctctcaacatctgtttaagttcatcgagagccacctcctcattttccagatagtcaaacattttgactgaatgagctactgtgaactctatacacccacacaactaatgtcattaaatattatttttttgaatgtatttataccatgtcaaaaacttgtacaattattaataaaaataatttagtgtttaaattttaccagttccagattttacacctccgttaaccccactttttacaccactggacgatcctcctccccacattccaccgccaccagatgtataagttttagatcctttattactaccatcatgtccatggataaagacactccacatgccgccactactaccccctttagaagacatattaataagacttaaggacaagtttaacaataaaattaatcacgagtaccctactaccaacctacactattatatgattatagtttctatttttacagtaccttaactaaagtctctagtcacaagagcaatactaccaacctacactattatatgattatagtttctatttttataggaacgcgtacgagaaaatcaaatgtctaatttctaacggtagtgttgataaacgattatcgtcaatggatacctcctctatcatgtcgtctattttcttactttgttctattaacttattagcattatatattatttgattataaaacttatattgcttattagcccaatctgtaaatatcggattattaacatatcgtttctttgtaggtttatttaacatgtacatcactgtaagcatgtccgtaccatttattttaatttgacgcatatccgcaatttctttttcgcagtcggttataaattctatatatgatggatacatgctacatgtgtacttataatcgactaatatgaagtacttgatacatattttcagtaacgatttattattaccacctatgaataagtacctgtgatcgtctaggtaatcaactgttttcttaatacattcgatggttggtaatttactcagaataatttccaatatcttaatatataattctgctatttctgggatatatttatctgccagtataacacaaatagtaatacatgtaaacccatattttgttattatattaatgtctgcgccattatctattaaccattctactaggctgacactatgcgacttaatacaatgataaagtatactacatccatgtttatctattttgtttatatcatcaatatacggcttacaaagttttagtatcgataacacatccaactcacgcatagagaaggtagggaataatggcataatatttattaggttatcatcattgtcattatctacaactaagtttccattttttaaaatatactcgacaactttaggatctctattgccaaatttttgaaaatatttatttatatgcttaaatctatataatgtagctccttcatcaatcatacatttaataacattgatgtatactgtatgataagatacatattctaacaatagatcttgtatagaatctgtatatcttttaagaattgtggatattaggatattattacgtaaactattacacaattctaaaatataaaacgtatcacggtcgaataatagttgatcaactatataattatcgattttgtgatttttcttcctaaactgtttacgtaaatagttagatagaatattcattagttcatgaccactatagttactatcgaataacgcgtcaaatatttcccgtttaatatcgcatttgtcaagataataatagagtgtggtatgttcacgataagtataataacgcatctcttttttgtgtgaaattaaatagtttatcacgtccaaagatgtagcataaccatcttgtgacctagtaataatataataatagagaactgttttacccattctatcatcataatcagtggtgtagtcgtaatcgtaatcgtctaattcatcatcccaattataatattcaccagcacgtctaatctgttctattttgatcttgtatccatactgtatgttgctacatgtaggtattcctttatccaataatagtttaaacacatctacattgggatttgatgttgtagcgtatttctctacaatattaataccatttttgatactatttatttctatacctttcgaaattagtaatttcaataagtctatatcgatgttatcagaacatagatattcgaatatatcaaaatcattgatatttttatagtcgactgacgacaataacaaaatcacaacatcgtttttgatattattatttttcttggtaacgtatgcctttaatggagtttcaccatcatactcatataatggatttgcaccactttctatcaatgattgtgcactgctggcatcgatgttaaatgttttacaactatcatagagtatcttatcgttaaccatgattggttgttgatgctatcgcattttttggtttctttcatttcagttatgtatggatttagcacgtttgggaagcatgagctcatatgatttcagtactgtagtgtcagtactattagtttcgatcagatcaatgtctagatctatagaatcaaaacacgataggtcagaagataatgaatatctgtacgcttctttttgtactgtaacttctggttttgttagatggttgcatcgtgctttaacatcaatggtacaaattttatcctcgctttgtgtatcatattcgtctctagtataaaattctatattcagattatcatgcgatgtgtatacgctaacggtatcaataaacggagcacaccatttagtcataacagtaatccaaaattttttaaagtatatcttaacgaaagaagttgtgtcattgtctacggtgtatggtactagatcctcataagtgtatatatctagagtaatgtttaatttattaaatggttgataatatggatcctcatgacaatttccgaagatggaaatgagatatagacatgcaataaatctaatcgaagacatggttactccttaaaaaaatacgaataatcaccttggctatttagtaagtgtcatttaacactatactcatattaatccatggactcataatctctatacgggattaacggatgttctatatacggggatgagtagttttcttctttaactttatactttttactaatcatatttagactgatgtatgggtaatagtgtttaaagagttcgttctcatcatcagaataaatcaatatctctgtttttttgttatacagatgtattacagcctcatatattacgtaatagaacgtgtcatctaccttattaactttcaccgcatagttgtttgcaaatacggttaatcctttgacctcgtcgatttccgaccaatctgggcgtataatgaatctaaactttaatttcttgtaatcattcgaaataatttttagtttgcatccgtagttatcccctttatgtaactgtaaatttctcaacgcgatatctccattaataatgatgtcgaattcgtgctgtatacccatactgaatggatgaactaacgaatatcaacggcgttaatagtaatttactttttcatctttacatattgggtactagttttactatcataagtttataaattccacaagctactatggaataagccaaccatcttagtataccacacatgtcttaaagtttattaattaattacatgttgttttatatatatcgctacgaatttaaagagaaatcagtttaggaagaaaaaaattatctatctacatcatcacgtctctgtattctacgatagagtgctactttaagatgagacatatccgtgtcatcaaaaatatactccattaaaatgattattccggcagcgaacttgatattggatatatcacaacctttgttaatatctacgacaatagacagcagtcccatggttccataaacagtgagtttatctttctttgaagcgatagtttgtagagatcttataaaaccgtcaaacgacatcgcatttatatctttagctaattcatatatgttaccatcgtaatatctaaccgcgtctatcttaaacgtttccatcgctttaaagacgtttccgatagatggtctcatttcatcagtcatactgagccaacaaatataatcgtgtataacatctttgatagaatcagactctaaagaaaacgaatcggctttattatacgcattcatgataaacttaatgaaaaatgtttttcgttgtttaagttggatgaatagtatgtcttaataattgttattatttcattaattaatatttagtaacgagtacactctataaaaacgagaatgacataactagttatcaaagtgtctaggacgcgtaattttcatatggtatagatcctgtaagcattgtctgtattctggagctattttctttatcgcattagtaagttcagaatatgttataaatttaaatcgaataacgaacatgactttagtaaagtcgtctatattaactcttttattttctagccatcgtaataccatgtttaagatagtatattctctagttactacgatctcatcgttgtctagaatatcacatactgaatctacatccaattttagaaattggtctgtgttacatatctcttctatattattgttgatgtattgtcgtagaaaactattacgtagaccattttctttataaaacgaatatatagtactccaattatctttaccgatatatttgcacacataatccattctctcaatcactacatctttaagattttcgttgttaagatatttggctaaactatataattctattagatcatcaacagaatcagtatatatttttctagatccaaagacgaactctttggcgtcctctataatattcccagaaaagatattttcgtgttttagtttatcgagatctgatctgttcatatacgccatgattgtacggtacgttatgataaccgcataaaataaaaatccattttcatttttaaccaatactattcataattgagattgatgtaatactttgttactttgaacgtaaagacagtacacggatccgtatctccaacaagcacgtagtaatcaaatttggtgttgttaaacttcgcaatattcatcaatttagatagaaacttatactcatcatctgttttaggaatccatgtattattaccactttccaacttatcattatcccaggctatgtttcgtccatcatcgttgcgcagagtgaataattcttttgtattcggtagttcaaatatatgatccatgcatagatcggcaaagctattgtagatgtgatttttcctaaatctaatataaaactcgtttactagcaaacactttcctgatttatcgaccaagacacatatggtttctaaatctatcaagtggtggggatccatagttatgacgcagtaacatagattattacattcttgactgtcgctaatatctaaatatttattgttatcgtattggattctgcatatagatggcttgtatgtcaaagatatagaacacataaccaatttatagtcgcgctttacattctcgaatctaaagttaagagatttagaaaacattatatcctcggatgatgttatcactgtttctggagtaggatatattaaagtctttacagatttcgtccgattcaaataaatcactaaataatatcccacattatcatctgttagagtagtatcattaaatctattatattttatgaaagatatatcactgctcacctctatatttcgtacatttttaaactgtttgtataatatctctctgatacaatcagatatatctattgtgtcggtagacgataccgttacatttgaattaatggtgttccattttacaacttttaacaagttgaccaattcatttctaatagtatcaaactctccatgattaaatattttaatagtatccattttatatcactacggacacaaagtagctgacataaaccattgtataatttttatgttttatgtttattagcgtacacattttggaagttccggcttccatgtatttcctggagagcaagtagatgatgaggaaccagatagtttatatccgtacttgcacttaaagtctacattgtcgttgtatgagtatgatcttttaaacccgctagacaagtatccgtttgatattgtaggatgtggacatttaacaatctgacacgtgggtggatcggaccattctcctcctgaacacaggacaccagagttaccaatcaacgaatatccactattgcaactataagttacaacgctcccatcggtataaaaatcctcgtatccgttatgtcttccgttggatatagatggaggggattggcatttaacagattcacaaataggtgcctcgggattccataccatagatccagtagatcctaattcacaatacgatttagattcaccgatcaactgatatccgctattacaagagtacgttatactagagccaaagtctactccgccaatatcaagttggccattatcgatatctcgaggcgatgggcatctccgtttaatacattgattaaagagtgtccatccagtacctgtacatttagcatatataggtcccattttttgctttctgtatccaggtagacatagatattctatagtgtctcctatgttgtaattagcattagtttccacactattcttaaattttatattaatgggacgtgaaggaataggacagtatgatagaacgcatcctattcccaacaatgtcaggaacgtcacgctctccaccttcatatttatttatccgtaaaaatgttatcctggacatcgtacaaataataaaaaagcccatatatgtttgctattgtagaaattgtttttcacagttgctcaaaaacgatggcagtgacttatgagtttcatctttagtaaacatatcataatattcgatattacgagttgacatatcgaacaaattccaagtatttgattttggataatattcgtattttgcatctgctataattaagatataatcaccgcaagaacacacgaacatctttcctacatggttaaagtacatgtataattctatccatttgtcttccttaactatatatttgtatagataattacgagtctcataagtaattccagtaattgcatagatgtcaccatcgtactctacagcataaactatactatgatgtctaggcatgggagacttttttatccaacgatttttagtgaaacattctacatcgtttaatactacatatttctcatacgtggtataaactccacccattacatatatatcatcgtttacgaataccgacgcgcctgaatatctaggagtaattaagtttggaagtcttatccatttcgaagtgccgtgtttcaaatattctgccacacccgttgaaatagaaaattctaatcctcctattacatataactttccatcgttaacacaagtactaacttctgattttaacgacgacatattagtaaccgttttccattttttcgttttaagatctacccgcgatacggaataaacatgtctattgttaatcatgccgccaataatgtatagacaattatgtaaaacatttgcattatagaattgtctatctgtattaccgactatcgtccaatattctgttctaggagagtaatgggttattgtggatatataatcagagtttttaatgactactatattatgttttataccatttcgtgtcactggctttgtagatttggatatagttaatcccaacaatgatatagcattgcgcatagtattagtcataaacttgggatgtaaaatgttgatgatatctacatcgtttggatttttatgtatccactttaataatatcatagctgtaacatcctcatgatttacgttaacgtcttcgtgggataagatagttgtcagttcatcctttgataattttccaaattctggatcggatgtcaccgcagtaatattgttgattatttctaacatcgacgcattatatagttttttaattccatattgtttagaaaagttaaacatccttatacaatttgtggaattaatattatgaatcatagtttttacacatagatctactacaggcgtaacatcaattattacggcagcaactagtatcatttctacattgtttatggtgatgtttatcttcttccagcgcatatagtctaatagcgattcaaacgcgtgatagtttataccattcaatataatcacttcatcatttatatggtgctcctgaatgcgtttaaaaaaattatacggagacgccgtaataatttccttattcacttgtataatttccccattgatagaaaatatcacgctttccattcttgaagtactataagtaattatagtataatgtaaacgtttatatattcaatatttttataaaaatcattttgacattaattcctttttaaatttccgtctatcatctatagaaacgtattctatgaatttataaaatgcttttacgtgtcctatcgtaggcgatagaaccgctaaaaagcctatcgaatttctacaaaagaatctattatatggtatagggagagtataaaacattaaatgcccgtacttattaaagtattcagtagccaatcctaactctttcgaatacttattaatggctcttgttctgtacgaatctatttttttgaacaacggacctagtggtatatcttgttctatgtatctaaaataatgtctgactagatccgttagtttaatatcctcagtcatcttgtctagaatggcaaatctaactgcgggtttaggctttagtttagtttttatatctacatctatgtctttatctaacaccaaaaatataatagctaatattttattacaatcatccggatattcttctacgatctcactaactaatgtttctttggttatactagtatagtcacgatcagacaaataaagaaaatcagatgatcgatgaataatacatttaaattcatcatctgtaagatttttgagatgtctcattaaaatattattagggttagtactcattatcattcggcagctattacttattttattatttttcaccatatagatcaatcattagatcatcaaaatatgtttcaatcatcctaaagagtatggtgaatgactcttcccatctaatttctgaacgttcaccaatgtctctagccactttggcactaatagcgatcattcgcttagcgtcttctatattattaactggttgattcaatctatctagcaatggaccgtcggacagcgtcattctcatgttcttaatcaatgtacatacatcgccgtcatctaccaattcatccaacaacataagctttttaaaatcatcattataataggtttgatcgttgtcatttctccaaagaatatatctaataagtagagtcctcatgattagttaacaactattttttatgttaaatcaattagtacaccgctatgtttaatacttattcatattttagtttttaggattgagaatcaatacaaaaaattaatgcatcattaattttagaaatacttagtttccacgtagtcaatgaaacatttgaactcatcgtacaggacgttctcgtacaggacgtaactataaaccggtttatatttgttcaagatagatacaaatccgataactttttttacgaattctacgggatccactttaaaagtgtcataccgggttctttttattcttttaaacagatcaatggtgtgatgttgattaggtcttttacgaatttgatatagaatagcgttcacatatcctccataatggtcaatcgccatttgttcgtatgtcataaattctttaattatatgacactgtgtattatttagttcatccttgttcatcattaggaatctatccaaaatggcaattatactagaactataggtgcgttgtatacacatattgatgtgtctgtttatacaatccatgatatttggatccatgctactaccttcgggtaaaattgtagcatcatataccatttctagtactttaggttcattattatccattgcagaggacgtcatgatcgaatcataaaaaaatatattatttttatgttattttgttaaaaataatcatcgaatacttcgtaagatactccttcatgaacataatcagttacaaaacgtttatatgaagtaaagtatctacgatttttacaaaagtccggatgcataagtacaaagtacgcgataaacggaataataatagatttatctagtctatctttttctatagctttcatagttagatacatggtctcagaagtaggattatgtaacatcagcttcgataaaatgactgggttatttagtcttacacattcgctcatacatgtatgaccgttaactacagagtctacactaaaatgattgaacaatagatagtctaccattgtttcgtattcagatagtacagcgtagtacatggcatcttcacaaattatatcattgtctaatagatatttgacgcatcttatggatcccacttcaacagccatcttaaaatcggtaaaatcatattgctttcctttatcattaataatttctaaaacatcatctctatcataaaagatacaaatattaactgtttgatccgtaataacattgctagtcgatagcaatttgttaataagatgcgctgggctcaatgtcttaataagaagtgtaagaggactatctccgaatttgttttgtttattaacatccgttgatggaagtaaaagatctataatgtctacattcttgactgttttagagcatacaatatggagaggtgtatttccatcatgatctggttttgagggactaattcctagtttcatcatccatgagattgtagaagcttttggattgtctgacataagatgtctatgaatatgatttttgccaaatttatccactatcctggcttcgaatccgatggacattatttttttaaacactctttctgaaggatctgtacacgccaacaacggaccacatccttcttcatcaaccgagttgttaatcttggctccatactgtaccaataaatttattctctctatgacttcatcatctgttcccgagagataatatagaggtgttttattatgtttatcacacgcgtttggatctgcgccgtgcgtcagcagcatcgcgactattctattattattaattttagaagctatatgcaatggataatttccatcatcatccgtctcatttggagagtatcctctatgaagaagttcttcgacaaatcgttcatctagtcctttaattccacaatacgcatgtagaatgtgataattatttccagaaggttcgatagcttgtagcatattcctaaatacatctaaatttttactattatatttggcataaagagatagataatactcggccgacataatgttgtccattgtagtataaaaattaatatttctatttctatttctgtatatttgcaacaatttactctctataacaaatatcataacttagttcttttatgtcaagaaggcactggtttagttcatctataaatgtcacgccataactaccacgcatgccatactcagaattatgataaagatatttatccttggggtgtaggtaatggggattaatctttgttggatcagtctctaagttaacacatgtcacacatgatccatttatagttatatcacacgatgatgatttatgaattgattccggaagatcgctatcgtattttgtggttccacaattcatttccatacatgttattgtcacactaatattatgatgaactttatctagccgctgagtggtaaacaacagaacagatagtttattatctttaccaacaccctcagccgctgccacaaatctctgatccgtatccatgatggtcatgtttatttctagtccgtatccagtcaacactatgttagcatttctgtcgatatagctttcactcatatgacactcaccaataatagtagaattaatgtcgtaatttacaccaatagtgagttcggcggcaaagtaccaataccggtaatcttgtcgaggaggacatatagtattcttgtattctactgaatacccgagagatgcgatacaaaagagtaagactaatttgtaaaccatcttactcaaaatatgtaacaatagtacgatgcaatgagtaagacaataggaaatctatcttatatacacataattattctatcaattttaccaattagttagtgtaatgttaacaaaaatgtgggagaatctaattagtttttctttacacaattgacgtacatgagtctgagttccttgtttttgctaattatttcatccaatttattattcttgactatatcgagatcttttgtataggagtcagacttgtattcaacatgcttttctataatcattttagctatttcggcatcatccaatagtacattttccagattagcagaatagatattaatgtcgtatttgaacagagcctgtaacatctcaatgtctttattatctatagccaatttaatgtccggaatgaagagaagggaattattggtgtttgtcgacgtcatatagtcgagcaagagaatcatcatatccacgtgtccattttttatagtggtgtgaatacaactaaggagaatagccagatcaaaagtagatggtatctctgaaagaaagtaggaaacaatacttacatcattaagcatgacggcatgataaaatgaagttttccatccagttttcccatagaacatcagtctccaatttttcttaacaaacagttttaccgtttgcatgttaccactatcaaccgcataatacaatgcggtgtttcccttgtcatcaaattgtgaatcatccagtccactgaatagcaaaatctttactattttggtatcttccaatgtggctgcctgatgtaatggaaattcattctctagaagatttttcaatgctccagcgttcaacaacgtacatactagacgcacgttattatcagctattgcataatacaaggcactatgtccatggacatccgccttaaatgcatctttgctagagagaaagcttttcagctgcttagacttccaagtattaattcgtgacagatccatgtctgaaacgagacgctaattagtgtatattttttcattttttataattttgtcatattgcaccagaattaataatatctctaatagatctgattagtagatacatggctatcgcaaaacaacatatacacatttaataaaaataatatttattaagaaaattcagatttcacgtacccatcaatataaataaaataatgattccttacaccgtacccatattaaggagattccaccttacccataaacaatataaatccagtaatatcatgtctgatgatgaacacaaatggtgtattaaattccagtttttcaggagatgatctcgccgtagctaccatgatagtagatgcctctgctacagttccttgttcgtcgacatctatctttgcattctgaaacattttataaatatataatgggtccctagtcatatgtttaaacaacgcattatctggattaaacatactaggagccatcatttcggctatcgacttaatatccctcttattttcgatagaaaatttagggagtttaagattgtacactttattccctaattgaaacgaccaatagtctaattttgcagccgtaatagaatctgtgaaatgggtcatattatcacctattgccaggtacatactaatattagcatccttatacggaaggcgtaccatatcatattcttcgtcatcgattgtgattgtatttccttgcaatttagtaactacgttcatcatgggaaccgttttcgtaccgtacttattagtaaaactagcattgcgtgttttagtgatatcaaacggatattgccatatacctttaaaatatatagtattaatgattgcccatagagtattattgtcgagcatattagaatctactacattagacataccggatctacgttctactatagaattaattttattaaccgcatctcgtctaaagtttaatctatataggccgaatctatgatattgttgataatacgacggtttaatgcacacagtattatctacgaaactttgataagttagatcagtgtacgtatatttagatgttttcagcttagctaatcctgatattaattctgtaaatgctggacccagatctctttttctcaaatccatagtcttcaataattctattctagtattacctgatgcaggcaatagcgacataaacatagaaaacgaataaccaaacggtgagaagacaatattatcatcttgaatatttttatacgctactataccggcattggtaaatccttgcagacgataggtagacactgaacacgttaacgatagtatcaataacgcaatcatgattttatggtattaataattaaccttatttttatgttcggtataaaaattattgatgtctacacatccttttgtaattgacatctatatatccttttgtataatcaactctaatcactttaacttttacagttttccctaccagtttatccctatattcaacatatctatccatatgcatcttaacactctctgccaagatagcttcaaagtgaggatagtcaaaaagataaatatatagagcataatcattctcgtatactctgccctttattacatcacccgcattgggcaacgaataacaaaatgcaagcatcttgttaacgggctcgtaaattgggataaaaattatgtttttatatctattttattcaagagaatattcaggaatttctttttccggttgtatctcatcgcagtatatatcatttgtacattgtttcatattttttaatagtctacaccttttagtaggactagtatcgtacaattcatagctgtattttgaattccaatcacgcataaaaatatcttccaattgttgacgaagacctaatccatcatccggtgtaatattaatagatgctccacatgtatccgtaaagtaatttcctgtccaatttgaggtacctatatacgccgttttatcggttaccatatatttggcatggtttaccctagaatacggaatgggaggatcagcatctggtacaataaatagctttacttctatatttatgtttttagattttagcatagcgatagatcttaaaaagtttctcatgataaacgaagatcgttgccagcaactaatcaatagcttaacggatacttgtctgtctatagcggctcttcttaattcatcttctatataaggccaaaacaaaatattgcctgccttcgaataaataatagggataaagttcataacagatacataaacgaatttactcgcatttctaatacatgacaataaagcggttaaatcattggttctttccatagtacatagttgttgcggtgcagaagcaataaatacagagtgtggaacaccacttacgttaatactaagaggatgatctgtattataatacgacggataaaagtttttccaattatatggtagattgttaactccaagataccagtatacctcaaaaatttgagtgagatccgctgccaagttcctattattgaagatcgcaatacccaattctttgacctgagttagtgatctccaatccatgttagcgcttcctaaataaatatgtgtattatcagatatccaaaattttgtatgaagaactcctcctaggatatttgtaatatctatgtatcgtacttcaactccggccatttgtagtctttcaacatcctttaatggtttgttagatttattgacggctactctaactcttactcctcttttgggtaattgtacaatctcgtttaatattatcgtgccgaaattcgtacccacttcatccgataaactccaataaaaagatgatatatctagtgtttttgtggtattggatagaatttccctccacatgttaaatgtagacaaatatactttatcaaattgcatacctataggaatagtctctgtaatcactgcgattgtattatccggattcattttatttgttaaaaaataatcctatatcacttcactctattaaaaatccaagtttctatttctttcatgactgattttttaacttcatccgtttccttatgaagatgatgtttggcaccttcataaatttttatttctctattacaatttgcatgttgcatgaaataatatgcacctaaaacatcgctaatctcattgtttgttccctggagtatgagagtcggggggtgttaatcttgggaattatttttctaaccttgttggtagccttcaagacctgactagcaaatccagccttaattttttcatgattgattaatgggtcgtattggtatttataaactttatccatatctctagatactgattctggacatagctttccgactggcgcatttggtgtgatggttcccataagtttggcagctagcagattcagttttgaaacagcatctgcattaactagaggagacattagaatcattgctgtaaacaagtttggattatcgtaagaggctagtatagaaattgttgctcccatggaatgcccaataagaagactggaactcctaaataagtagatttaatagttaccacgtgctgtaccacatctctaacatacgtaccaaagtcatcaatcatcattttttcaccattacttcttccatgtccaatatgatcatgtgagaatactaaaattcctaacgatgatatgttttcagctagttcgtcataacgtccagaatgtttaccagctccatgacttatgaatactaatgccttaggatatgtaataggtttccaatatatgtaatcattgtccagattgaacatacagtttgcactcatgattcacgttatataactatcaatattaacagttcgtttgatgatcatattatttttatgttttattgataattgtaaaaacatacaattaaatcaatatagaggaaggagacggctactgtcttttgtgagatagtcatggcgactaaattagattatgaggatgctgttttttactttgtggatgatgataaaatatgtagtcgcgactccatcatcgatctaatagatgaatatattacgtggagaaatcatgttatagtgtttaacaaagatattaccagttgtggaagactgtacaaggaattgatgaagttcgatgatgtcgctatacggtactatggtattgataaaattaatgagattgtcgaagctatgagcgaaggagaccactacatcaattttacaaaagtccatgatcaggaaagtctattcgctaccataggaatatgtgctaaaatcactgaacattggggatacaaaaagatttcagaatctagattccaatcattgggaaacattacagatctgatgaccgacgataatataaacatcttgatactttttctagaaaaaaaattgaattgatgatataggggtcttcataacgcataattattacgttagcattctatatccgtgttaaaaaaaattatcctatcatgtatttgagagttttatatgtagcaaacatgatagctgtgatgccaataagctttagatattcacgcgtgctagtgttagggatggtattatctggtggtgaaatgtccgttatataatctacaaaacaatcatcgcatatagtatgcgatagtagagtaaacatttttatagtttttactggattcatacatcgtctacccaatttggttataaatgaaattgtcgccaatcttacacccaaccccttgttatccattagtatagtattaacttcgttatttatgtcataaactgtaaatgattttgtagatgccatatcatacatgatattcatgtccctattataatcattactaactttatcacaatatatgttgataatatctatatatgatctagtctttgtgggcaactgtctatacaagtcgtctaaacgttgtttactcatatagtatcgaacagccatcattacatggtcccgttccgttgatagataatcgagtatgttagtggacttgtcaaatctatataccatattttctggaagtggatatacatagtcgtgatcaacattattgctagcctcatcttctatatcatgtactataccattatctatatcatctacataatctacgatattattacacataaacatcgacaacatactattgtttattatctaagtcctgttgatccaaacccttgatctcctctatttgtactatctagagattgtacttcttccagttctggataatatatacgttgatagattagctgagctattctatctccagtatttacattaaacgtacattttccattattaataagaatgactcctatgtttcccctataatcttcgtctattacaccacctcctatatcaatgccttttagtgacagaccagacctaggagctattctaccatagcaaatcttaggcatggacatactaatatctgtcttaattaactgtctttctcctggagggatagtataatcgtaagcgctatacaaatcatatccggcagcacccggcgattgcctagtaggagatttagctctgttagtttccttaacaaatctaactggtgagttaatattcatgttgaacataaaactaatattttatttcaaaattatttaccatcccatatattccatgaataagtgtgatgattgtacacttctatagtatctatatacgattcacgataaaatcctcctatcaatagcagtttattatccactatgatcaattctggattatccctcggataaataggatcatctatcagagtccatgtattgctggattcacaataaaattccgcatttctaccaaccaagaataaccttctaccgaacactaacgcgcatgatttataatgaggataataagtggatggtccaaactgccactgatcatgattgggtagcaaatattctgtagttgtatcagtttcagaatgtcctcccattacgtatataacattgtttatagatgccactgctggattacatctaggtttcagaagactcggcatattaacccaagcagcatccccgtggaaccaacgctcaacagatgtgggatttggtagacctcctactacgtataatttattgttagcgggtatcccgctagcatacagtctggggctattcatcggaggaattggaatccaattgtttgatatataatttacagctatagcattgttatgtatttcattgttcatccatccaccgatgagatatactacttctccaacatgagtacttgtacacatatggaatatatctataatttgatccatgttcataggatactctatgaatggatacttgtatgatttgcgtggttgtttatcacaatgaaatattttggtacagtctagtatccattttacattatttatacctctgggagaaagataatttgacctgattacatttttgataaggagtagcagatttcctaatttatttcttcgctttatataccacttaatgacaaaatcaactacataatcctcatctggaacatttagttcatcgctttctagaataagtttcatagatagataatcaaaattgtctatgatgtcatcttccagttccaaaaagtgtttggcaataaagtttttagtatgacataagagattggatagtccgtattctatacccatcatgtaacactcgacacaatattcctttctaaaatctcgtaagataaagtttatacaagtgtagatgataaattctacagaggttaatatagaagcacgtaataaattgacgacgttatgactatctatatatacctttccagtatacgagtaaataactatagaagttaaactgtgaatgtcaaggtctagacaaaccctcgtaactggatctttatttttcgtgtatttttgacgtaaatgtgtgcgaaagtaaggagataactttttcaatatcgtagaattgactattatattgccacctatagcatcaataattgttttgaatttcttagtcatagacaatgctaatatattcttacagtacacagtattaacaaatatcggcatttatgtttctttaaaagtcaacatctagagaaaaatgattatctttttgagacataactcccattttttggtattcacccacacgtttttcgaaaaaattagtttttccttccaatgatatattttccatgaaatcaaacggattggtaacattataaatttttttaaatcccaattcagaaatcaatctatccgcgacgaattctatatatgttttcatcatttcacaattcattcctataagtttaactggaagagccgcagtaagaaattcttgttcaatggatactgcatctgttataatagatctaacggtttcttcactcggtggatacaataaatgtttaaacatcaaacatgcgaagtcgcagtgtagaccctcgtctctactaattagttcgttggaaaacgtgagtccgggcattaggccacgctttttaagccaaaatatggaagcgaatgatccggaaaagaagattccttctactgcagcaaaggcaataagtctctctccataaccggcgctgtcatgtatccacttttgagcccaatcggccttcttttttacacaaggcatcgtttctatggcattaaagagatagtttttttcattactatctttaacataagtatcgatcaaaagactatacatttccgaatgaatgttttcaatggccatctgaaatccgtagaaacatctagcctcggtaatctgtacttctgtacaaaatcgttccgccaaattttcattcactattccgtcactggctgcaaaaaacgccaatacatgttttataaaatatttttcgtctggtgttagtttattccaatcattgatatctttagatatatctacttcttccactgtccaaaatgatgcctctgcctttttatacatgttccagatgtcataatattggattgggaaaataacaaatctatttggatttggtgcaaggatgggttccataactaaattaacaatatcaataaattttttttcagttatctatatgcctgtacttggattttttgtacatcgatatcgccgcaatcactacaataattacaagtattattgatagcattgttattagtactatcataattaaattatcgacattcatgggtgctgaataatcgttattatcatcattatcattttgtaattgtgacatcatactaaataaatcgtttgcgagattgttgtgggaagcgggcatggaggatgcattatcattattatttaacgccttccatttggattcacaaatgttacgcacattcaacattttatggaaactataattttgtgaaaacagataacaagaaaactcgttatcgttcaaatttttaacgatagtaaaccgattaaacgtcgagctaatttctaacgctagcgactctgttggatatgggtttccagatatatatcttttcagttcccctacgtatctataatcatctgtaggaaatggaagatatttccatttatctactgttcctaatatcatatgtggtggtgtagtagaaccattaagcgcgaaagatgttatttcgcatcgtattttaacttcgcaataatttctggttagataacgcactctaccagtcaagtcaatgatattagcctttacagatatattcatagtagtcgtaacgatgactccatcttttagatgcgatactcctttgtatgtaccagaatcttcgtacctcaaactcgatatatttaaacaagttaatgagatattaacgcgttttatgaatgatgatatataaccagaagttttatcctcggtggctagcgctataaccttatcattataataccaactagtgtgattaatatgtgacacgttagtgtgggtacaaatatgtacattatcgtctacgtcgtattcgatacatccgcatacagccaacaaatataaaatgacaaatactctaacgccgttcgtacccatcttgatgcggtttaataaatgttttgatttcaatttattgtaaaaaaagattcggttttatactgttcgatattctcattgcttatattttcatctatcatctccacacagtcaaatccgtggttagcatgcacctcatcaaccggtaaaagactatcggactcttctatcattataactctagaatatttaatttggtcattattaatcaagtcaattatcttatttttaacaaacgtgagtattttactcattttttataaaaacttttagaaatatacagactctatcgtgtgtctatatcttctttttatatccaatgtatttatgtctgatttttcttcatttatcatatataatggtccaaattctacacgtgcttcggattcatccagatcattaaggttcttataattgtaacatccttctcttccctcttctacatcttccttcttattcttattcttagcgtcacagaatctaccacagcaggatcccatgacgagcgtcatattaaactaattcattttcaattataatatactggtaatgaccattaaaataaaaatattcttcataaccggtaagaaagtgaaaagttcacattgaaactatgtcagtagtatacatcatgaaatgagatgaaatgatgatatatatactctattttggtggaggattatatgatataattcgtggataatcatttttaagacacatttctttattcgtaaatcttttcacgttaaatgagtgtccatattttgcaatttcttcatatgatggcggtgtacgtggacgaggctgctcctgttcttgttgtagtcgccgactgtcgtgtttgcgtttagatccctccattatcgcgattgcgtagatggagtactattatataccttgtaattaaatttttttattaattaaacgtataaaaacgttccgtatctgtatttaagagccagatttcgtctaatagaacaaatagctacagtaaaaataactagaataattgctacacccactagaaaccacggatcgtaatacggcaatcggttttcgataataggtggaacgtatattttatttaaggacttaacaattgtctgtaaaccacaatttgcttccgcggatcctgtattaactatctgtaaaagcatatgttgaccgggcggagccgaacattctccgatatctaatttctgtatatctataatattattaacctccgcatacgcattacagttcttttctagcttggataccgcactaggtacatcgtctagatctattcctatttcttcagcgatagctcttctatccttttccggaagcaatgaaatcacttcaataaatgattcaaccatgagtgtgaaactaagtcgagaattactcatgcatttgttagttattcggagcgcgcaatttttaaactgtcctataacctctcctatatgaatagcacaagtgacattagtagggatagaatgttgagctaatttttgtaaataactatctataaaaagattatacaaagttttaaactctttagtttccgccatttatccagtctgagaaaatgtctctcataataaatttttccaagaaactaattgggtgaagaatggaaacctttaatctatatttatcacagtctgtcttggtacacatgatgaattcttctaatgctgtactaaattcgatatctttttcgatttctggatatgtttttaataaagtatgaacaaagaaatggaaatcgtaataccagttatgtttaactttgaaattgttttttattttcttgttaatgattccagccacttgggaaaagtcaaagtcgtttaatgccgatttaatacgttcattaaaaacaaactttttatcctttagatgaattattattggttcattggaatcaaaaagtaagatattatcgggtttaagatctgcgtgtaaaaagttgtcgcagcatggtagttcgtaaattttaatgtataacagagccatctgtaaaaagataaactttatgtattgtaccaaagatttaaatcctaatttgatagctaactcggtatctactttatctgcagaatacagtgctaggggaaaaattataatatttcctctttcgtattcgtagttagttctcttttcatgttcgaaaaagtgaaacatgcggttaaaatagtttataacattaatattactgttaataactgccgggtaaaagtgggatagtaatttcacgaatttgatactgtcctttctctcgttaaacgcctttaaaaaaactttagaagaatatctcaatgagagttcctgaccatccatagtttgtatcaataatagcaacatatgaagaacccgtttatacagagtatgtaaaaatgttaatttatagtttaatcccatggcccacgcacacacgattaattttttttcatctccctttagattgttgtatagaaatttgggtactgtgaactccgccgtagtttccatgggactatataattttgtggcctcgaatacaaattttactacatagttatctatcttaaagactataccatatcctcctgtagatatgtgataaaaatcgtcgtttataggataaaatcgtttatccttttgttggaaaaaggatgaattaatgtaatcattctcttctatctttagtagtgtttccctattaaaattcttaaaataatttaacaatctaactgacggagcccaattttggtgtaaatctaattgggacattatattgttaaaatacaaacagtctcctaatataacagtatctgataatctatggggagacatccattgatattcaggggatgaatcattggcaacacccatttattgtacaaaaagccccaatttacaaacgaaagtccaggtttgatagagacaaactattaactattttgtctctgtttttaatttctttagtaatgaaattattcacaatatcagtatcttctttatctaccagagattttactaacttgataaccttggctgtctcattcaatagggtagtaatatttgtatgtgtgatattgatatctttttgaattgtttcttttagaagtgattctttgatggtgccagcatacgaattacaataatgcagaaactcggttaacatgcaggaattatagtaagccaattccaattgttgcctgtattgtattagagtattaatatgcgcaatggtgtccttgcgtttctctgatagaatgcgagcagcgattttggcgttatcatttgacgatatttctggaatgacgaatcctgtttctactaactttttggtaggacaaagtgaaacaatcaagaagatagcttctcctcctatttgtggaagaaattgaactcctctagatgatctactgacgatagtatctccttgacagatattggaccgaattacagaagtacctggaatgtaaagccctgaaaccccctcattttttaagcagattgttgccgtaaatcctgcactgtgaccaagatagagagctcctttggtgaatccatctctatgtttcagtttaaccaagaaacagtcagctggtctaaaatttccatctctatctaatacagcatctaacttgatgtcaggaactatgaccggtttaatgttatatgtaacattgagtaaatccttaagttcataatcatcactgtcatcagttatgtacgatccaaacaatgtttctaccggcatagtggatacgaagatgctatccatcagaatgtttccctgattagtattttctatatagctattcttctttaaacgattttccaaatcagtaactatgttcatttttttaggagtaggacgcctagccagtatggaagaggattttctagatcctctcttcaacatctttgatctcaatggaatgcaaaaccccatagtgaaacaaccaacgataaaaataatattgtttttcactttttataattttaccatctgactcatggattcattaatatctttataagagctactaacgtataattctttataactgaactgagatatatacaccggatctatggtttccataattgagtaaatgaatgctcggcaataactaatggcaaatgtatagaacaacgaaattatactagagttgttaaagttaatattttctatgagctgttccaataaattatttgttgtgactgcgttcaagtcataaatcatcttgatactatccagtaaacagtctttaagttctggaatattatcatcccattgtaaagcccctaattcgactatcgaatatcctgctctgatagcagtttcaatatcgacggacgtcaatactgtaataaaggtggtagtattgtcatcatcgtgataaactactggaatatggtcgttagtaggtacggtaactttacacaacgcgatatataactttccttttgtaccatttttaacgtagttgggacgtcctgcagggtattgttttgaagaaatgatatcgagaacagatttgatacgatatttgttggattcctgattatttactataatataatctagacagatagatgattcgataaatagaaaaggtatatcgttggtaggataatacatccccattccagtattctcggatactctattaatgacactagttaagaacatgtcttctattctagaaaacgaaaacatcctacatggactcattaaaacttctaacgctcctgattgtgtctcgaatgcctcgtacaaggatttcaaggatgccatagattctttgaccaacgatttagaattgcgtttagcatctgatttttttattaaatcgaatggtcggctctctggtttgctaccccaatgataacaatagtcttgtaaagataaaccgcaagaaaatttatacgcatccatccaaataaccctagcaccatcggatgatattaatgtattattatagattttccatccacagttattgggccagtatactgttagcaacggtatatcgaatagattactcatgtaacctactagaatgatagttcgtgtactagtcataatatctttaatccaatctaagaaatataaaattagatcttttacactgttaaagttaacaaaggtattacccggatacgtggatatcatatatggcattggtccattatcagtaatagctccataaactgatacggcgatggtttttatatgtgtttgatctaacgaggaagaaattcgcgcccacaattcatctctagatatgtatttaatatcaaacggtaacacatcaatttcgggacgcgtatatgtttctaaatttttaatccaaatataatgatgacctatatgccctattatcatactgtcaactatagtacacctagagaacttacgatacatctgtttcctgtaatcgttaaattttacaaatctataacatgctaaaccttttgacgacaaccattcattaatttctgatatggaatctgtattctcgataccgtattgttctaaagccagtgctatatctccctgttcgtgggaacgctttcgtataatatcgatcaacggataatctgaagtttttggagaataatatgactcatgatctatttcgtccataaacaatctagacataggaattggaggcgatgatcttaattttgtgcaatgagtcgtcaatcctataacttctaatcttgtaatattcatcatcgacataatactatctatgttatcatcgtatattagtataccatgaccttcttcatttcgtgccaaaatgatatacagtcttaaatagttacgcaatatctcaatagtttcataattgttagctgttttcatcaagatttgtaccctgtttaacatgatggcgttctatacgtttctattttctattttttaaatttttaacgatttactgtggctagatacccaatctctctcaaatatttttttagcctcgcttacaagctgtttatctatactattaaaactgacgaatccgtgattttggtaatgggttccgtcgaaatttgccgaagtgatatgaacatattcgtcgtcgactatcaacaattttgtattattctgaatagtgaaaaccttcacagatagatcattttgaacacacaacgcgtctagacttctggcggttgccatagaatatacgtcgttcttatcccaattaccaactagaagtctgatcttaactcctctattaatggctgcttctataatggagttgtaaatgtcgggccaatagtagctattaccgtcgacacgtgtagtgggaactatggccaaatgttcaatatctatactagtcttagctgacctgagtttatcaataactacatcggtatctagatctctagaatatcccaataggtgttccggagaatcagtaaagaacactccacctataggattcttaatatgatacgcagtgctaactggcagacaacaagccgcagagcataaattcaaccatgaattttttgcgctattaaaggctttaaaagtatcaaatcttctacgaagatctgtggccagcgggggataatcagaatatacacctaacgttttaatcgtatgtatagatcctccagtaaatgacgcgtttcctacataacatctttcatcatctgacacccaaaaacaaccgagtagtagtcccacattattttttttatctatattaacggttataaaatttatatccgggcagtgactttgtagctctcccagatttcttttccctcgttcatctagcaaaactattattttaatccctttttcagatgcctcttttagtttatcaaaaataagcgctcccctagtcgtactcagaggattacaacaaaaagatgctatgtatatatatttcttagctagagtgataatttcgttaaaacattcaaatgttgttaaatgatcggatctaaaatccatattttctggtagtgtttctaccagcctacattttgctcccgcaggtaccgatgcaaatggccacatttagttaacataaaaacttatacatcctgttctatcaacgattctagaatatcatcggctatatcgctaaaattttcatcaaagtcgacatcacaacctaactcagtcaatatattaagaagttccatgatgtcatcttcgtttatttctatatccgtatccattgtagattgttgaccgattatcgagtttaaatcattactaatactcaatccttcagaatacaatctgtgtttcattgtaaatttataggcggtgtatttaagttggtagattttcaattatgtatcaatatagcaacagtagttcttgctcctccttgattctagcatcctcttcattattttcttctacgtacataaacatgtccaatacgttagacaacacaccgacgatggcggccgccacagacacgaatatgactaaaccgatgaccatttaaaaacccctctctagctttcacttaaactgtatcgattattcttttagaacatgtataatataaaaacattattctatttcgaatttaggcttccaaaaatttttcatccgtaaaccgataataatatatatagacttgttaatagtcggaataaatagattaatgcttaaactatcatcatctccacgattagagatacaatatttacattctttttgctgtttcgaaactttatcaatacacgttaatacaaacccaggaaggagatattgaaactgaggctgttgaaaatgaaacggtgaatacaataattcagataatgtaaaatcatgattccgtattctgatgatattagaactgctaatggatgtcgatggtatgtatctaggagtatctattttaacaaagcatcgatttgctaatatacaattatccttttgattaattgttattttattcatattcttaaaaggtttcatatttatcaattcttctacattaaaaatttccatttttaatttatgtagccccgcaatactcctcattacgtttcattttttgtctataatatccattttgttcatctcggtacatagattatccaattgagaagcgcatttagtagttttgtacattttaagtttattgacaaatcgtcgaaaactagttatagttaacattttattatttgataccctgatattaatacccctgccgttactattatttataactgatgtaatccacgtaacattagaattaattatcgatagtaatgcatcgacgcttccaaaattgtctattataaactcaccgataatttttttattgcatgttttcatattcattaggattatcaaatctttaatcttattacgattgtatgcgttgatattgcaagacgtcattctaaaagacggaggatctccatcaaatgccaaacaatcacgtacaaagtacatggaaataggttttgttctattgcgcatcatagatttatatagaacacccgtagaaatactaatttgttttactctataaaatactaatgcatctatttcatcgttttgtataacgtctttccaagtgtcaaattccaaatttttttcattgatagtaccaaattcttctatctctttaactacttgcatagataggtaattacagtgatgcctacatgccgttttttgaaactgaatagatgcgtctagaagcgatgctacgctagtcacaatcaccactttcatatttagaatatatgtatgtaaaaatatagtagaatttcattttgtttttttctatgctataaatgaattctcattttgcatctgctcatactccgttttatatcaataccaaagaaggaagatatttggttctaaaagccgttaaagtatgcgatgttagaactgtagaatgtgaaggaagtaaagcttcctgcgtactcaaagtagataaaccctcatcacccgcgtgtgagagaagaccttcgtccccttccagatgcgagagaatgaataacccaggaaaacaagttccgtttatgaggacggacatgctacaaaatatgttcgcggctaatcgcgataatgtagcttctagacttttgtcctaaaatactattatatccttttcgatattaataaatccgtgtcgtccaggttttttatctctttcagtatgtgaatagataggtattttatctctattcatcatcgaatttaagagatccgataaacattgtttgtattctccagatgtcagcatctgatacaacaatatatgtgcacataaacctctggcacttatttcatgtaccttccccttatcactaaggagaatagtatttgagaaatatgtatacatgatattatcatgaattagatatacagaatttgtaacactctcgaaatcacacgatgtgtcggcgttaagatctaatatatcactcgataacacattttcatctagatacactagacattttttaaagctaaaatagtctttagtagtgacagtaactatgcgattattttcatcgatgatacatttcatcggcatattattacgcttaccatcaaagactataccatgtgtatatctaacgtattctagcatggttgccatacgcgcattaaacttttcaggatctttggatagatcttccaatctatctatttgagaaaacatttttatcatgttcaatagttgaaacgtcggatccactatatagatattatctataaagattttaggaactacgttcatggtatcctggcgaatattaaaactatcaatgatatgattatcgttttcatcttttatcaccatatagtttctaagatatgggattttacttaatataatattatttcccgtgataaattttattagaaaggccaaatctataagaaaagtcctagaattagtctgaagaatatctatatcgccgtatagtatatttggattaattagatatagagaatatgatccgtaacatatacaacttttattatggcgtctaagatattcttccatcaacttattaacatttttgactagggaagatacattatgacgtcccattacttttgccttgtctattactgcgacgttcatagaatttagcatatctcttgccaattcttccattgatgttacattataagaaattttagatgaaattacatttggagctttaatagtaagaactcctaatatgtccgtgtatgtggtcactaatacagattgtagttctataatcgtaaataatttacctatattatatgtttgagtctgtttagaaaagtagctaagtatacgatcttttatttctgatgcagatgtattaacatcggaaaaaaatctttttttattcttttttactaaagatacaaatatgtctttgttaaaaacagttattttttgaatatttctagcttgtaattttaacatatgatattcgttcacactaggtactctgcctaaataggtttctataatctttaatgtaatattaggaaaagtattctgatcaggattcctattcattttgaggatttaaaactctgattattgtctaatatggtctctacgcaaactttttcacagagcgatagagtttttgataactcgtttttcttaagaaatataaaactactgtctccagagctcgctctatcttttattttatctaattcgatacaaactcctgatactggttcagaaagtaattcattaattttcagtcctttatagaagatatttaatatagataatacaaaatcttcagtttttgatatcgatctgattgatcctagaactagatatattaataacgtgctcattaggcagtttatggcagcttgataattagatatagtatattccagttcatatttattagataccgcattgcccagattttgatattctatgaattcctctgaaaataaatccaaaataactagacattctattttttgtggattagtgtactctcttccctctatcatgttcactactggtgtccacgatgataaatatctagagggaatataatatagtccataggatgccaatctagcaatgtcgaataactgtaattttattcttcgctcttcattatgaattgattcttgaggtataaacctaacacaaattatattattagacttttcgtatgtaatgtctttcatgttataagtttttaatcctggaatagaatctattttaatgaggcttttaaacgcagagttctccaacgagtcaaagcataatactctgttgtttttcttatatacgatgttacgattttcttctttgaatggaataggtttttgaattagtttataattacaacataatagataaggaagtgtgcaaatagtacgcggaaaaaacataatagctcccctgttttcatccatggttttaagtaaatgatcactggcttctttagtcaatggatattcgaacattaaccgtttcatcatcattggacagaatccatattttttaatgtaaagagtgatcaaatcattgtgtttattgtaccatcttgttgtaaatgtgtattcggttatcggatctgctcctttttctattaaagtatcgatgtcgatctcgtctaagaattcaactatatcgacatatttcatttgtatacacataaccattactaacgtagaatgtataggaagagatgtaacgggaacagggtttgttgattcgcaaactattctaatacataattcttctgttaatacgtcttgcacgtaatctattatagatgccaagatatctatataattattttgtaagatgatgttaactatgtgatctatataagtagtgtaataattcatgtattttgatatatgttccaactctgtctttgtgatgtctagtttcgtaatatctatagcatcctcaaaaaatatattcgcatatattcccaagtcttcagttctatcttctaaaaaatcttcaacgtatggaatataataatctattttacctcttctgatatcattaatgatatagtttttgacactatcttctgtcaattgattcttattcactatatctaagaaacggatagcgtccctaggacgaactactgccattaatatctctattatagcttctggacataattcatctattataccagaattaatgggaactattccgtatctatctaacatagttttaagaaagtcagaatctaagacttgatgttcatatattggttcatacatgaaatgatctctattgatgatagtgactatttcattctctgaaaattggtaactcattctatatatgctttccttgttgatgaaggatagaatatactcaatagaatttgtaccaacaaactgttctcttatgaatcgtatatcatcatctgaaataatcatgtaaggcatacatttaacaattagagacttgtctcctgttatcaatatactattcttgtgataatttatgtgtgaggcaaatttgtccacgttctttaattttgttatagtagatatcaaatccaatggagctacagttcttggcttaaacagatatagtttttctggaacgaattctacaacattattataaaggactttgggtagataagtgggatgaaatcctattttaattaatgcgatagccttgtcctcgtgcagatatccaaacgcttttgtgatagtatggcattcattgtctagaaacgctctacgaatatctgtgacagatatcatctttagagaatatactagtcgcgttaatagtactacaatttgtattttttaatctatctcaataaaaaaattaatatgtatgattcaatgtataactaaactactaactgttattgataactagaatcagaatctaatgatgacgtaaccaagaagtttatctactgccaatttagctgcattatttttagcatctcgtttagattttccatctgccttatcgaatactcttccgtcgatatctacacaggcataaaatgtaggagagttactaggccccactgattcaatacgaaaagaccaatctctcttagttatttggcagtactcattaataatggtgacagggttagcatctttccaatcaataatttttttagccggaataacatcatcaaaagacttatgatcctctctcattgatttttcgcgggatacatcatctattatggcgtcagccataacatcagcatccggcttatccgcctccgttgtcataaaccaacgaggaggaatatcgtcggagctgtacaccatagcactacgttgaagatcgtacagagctttattaacttctcgcttctccatattaagttgtctagttagttgtgcagcagtagctccttcgattccaatgtttttaatagccgcacacacaatctctgcgtcagaacgctcgtcaatatagatcttagacatttttagagagaactaacacaaccagcaataaaactaatttattttatcatttttttattcatcatcctctggtggttcgtcgtttctatcgaatgtggatctgattaacccgtcatctataggtgatgctggttctggagattctggaggagatggattattatctggaagaatctctgttatttccttgttttcatgtatcgattgcgttgtaacattaagattgcgaaatgctctaaatttgggaggcttaaagtgttgtttgcaatctctacacgcatgtctaactagtggaggttcgtcagcggctctagtttgaatcatcatcggcgtagtattcctacttttacagttaggacacggtgtattgtatttctcgtcgagaacgttaaaataatcgttgtaactcacatcctttattttatctatattgtattctactcctttcttaatgcattttataccgaataagagatagcgaaggaattctttttcggtgccgctagtacccttaatcatatcacatagtgttttatattccaaatttgtggcaatagacggtttatttctatacgatagtttgtttctggaatcctttgagtattctataccaatattattctttgattcgaatttagtttcttcgatattagattttgtattacctatattcttgatgtagtactttgatgatttttccatggcccattctattaagtcttccaagttggcatcatccacatattgtgatagtaattctcggatatcagtagcggctaccgccattgatgtttgttcattggatgagtaactactaatgtatacattttccatttataacacttatgtattaactttgttcatttatattttttcattattatgttgatattaacaaaagtgaatatatatatatgttaataattgtattgtggttatacggctacaattttataatgagtgaaagtcagtgtccgatgatcaatgacgatagctttactctgaaaagaaagtatcaaatcgatagtgcggagtcaacaataaaaatggataagaagaggataaagtttcagaatagagccaaaatggtaaaagaaataaatcagacaataagagcagcacaaactcattacgagacattgaaactaggatacataaaatttaagagaatgattaggactactactctagaagatatagcaccatctattccaaataatcagaaaacttataaactattctcggacatttcagccatcggcaaagcatcacagaatccgagtaagatggtatatgctctgctgctttacatgtttcccaatttgtttggagatgatcatagattcattcgttatagaatgcatccaatgagtaaaatcaaacacaagatcttctctcctttcaaacttaatcttattagaatattagtggaagaaagattctataataatgaatgcagatctaataaatggaaaataattggaacacaagttgataaaatgttgatagctgaatctgataaatatacaatagatgcaaggtataacctaaaacccatgtatagaatcaagggagaatctgaagaagataccctctttatcaaacagatggtagaacaatgtgtgacatcccaggaattggtggaaaaagtgttgaagatactgtttagagatttgttcaagagtggagaatacaaagcgtacagatacgatgatgatgtagaaaatggatttattggattggatacactaaaattaaacattgttcatgatatagttgaaccatgtatgcctgttcgtaggccagtggctaagatactgtgtaaagaaatggtaaataaatactttgagaatccgctacatattattggtaaaaatcttcaagagtgcattgactttgttagtgaataggcatttcatctttctccaatactaattcaaattgttaaattaataatggatagtataaatagttattagtgataaaatagtaaaaataattattagaataagagtgtagtatcatagataactctcttctataaaaatggattttattcgtagaaagtatcttatatacacagtagaaaataatatagattttttaaaggatgatacattaagtaaagtaaacaattttaccctcaatcatgtactagctctcaagtatctagttagcaattttcctcaacacgttattactaaggatgtattagctaataccaatttttttgttttcatacatatggtacgatgttgtaaagtgtacgaagcggttttacgacacgcatttgatgcacccacgttgtacgttaaagcattgactaagaattatttatcgtttagtaacgcaatacaatcgtacaaggaaaccgtgcataaactaacacaagatgaaaaatttttagaggttgccgaatacatggacgaattaggagaacttataggcgtaaattatgacttagttcttaatccattatttcacggaggggaacccatcaaagatatggaaatcatttttttaaaactgtttaagaaaacagacttcaaagttgttaaaaaattaagtgttataagattacttatttgggcatacctaagcaagaaagatacaggcatagagtttgcggataatgatagacaagatatatatactctatttcaacaaactggtagaatcgtccatagcaatctaacagaaacgtttagagattatatctttcccggagataagactagctattgggtgtggttaaacgaaagtatagctaatgatgcggatatcgttcttaatagacacgccattaccatgtatgataaaattcttagttatatatactctgagataaaacagggacgcgttaataaaaacatgcttaagttagtttatatctttgagcctgaaaaagatatcagagaacttctgctagaaatcatatatgatattcctggagatatcctatctattattgatgcaaaaaacgacgattggaaaaaatattttattagtttttataaagctaattttattaacggtaatacatttattagtgatagaacgtttaacgaggacttattcagagttgttgttcaaatagatcccgaatatttcgataatgaacgaattatgtctttattctctacgagtgctgcggacattaaacgatttgatgagttagatattaataacagttatatatctaatataatttatgaggtgaacgatatcacattagatacaatggatgatatgaagaagtgtcaaatctttaacgaggatacgtcgtattatgttaaggaatacaatacatacctgtttttgcacgagtcggatcccatggtcatagagaacggaatactaaagaaactgtcatctataaaatccaagagtagacggctgaacttgtttagcaaaaacattttaaaatattatttagacggacaattggctcgtctaggtcttgtgttagatgattataaaggagacttgttagttaaaatgataaaccatcttaagtctgtggaggatgtatccgcattcgttcgattttctacagataaaaaccctagtattcttccatcgctaatcaaaactattttagctagttataatatttccatcatcgtcttatttcaaaggtttttaagagataatctatatcatgtagaagaattcttggataaaagcatccatctaaccaagacggataagaaatatatacttcaattgataagacacggtagatcatagaacagaccaaatatattattaataatttgtatatacatagatataattatcacatattaaaaattcacacatttttgataaatgggaactgctgcaacaattcagactcccaccaaattaatgaataaagaaaatgcagaaatgattttggaaaaaattgttgatcatatagttatgtatattagtgacgaatcaagtgattcagaaaataatcctgaatatattgattttcgtaacagatacgaagactatagatctctcattataaaaagtgatcacgagtttgtaaagctatgtaaaaatcatgcagagaaaagttctccagaaacgcaacaaatgattatcaaacacatatacgaacaatatcttattccagtatctgaagtactattaaaacctataatgtccatgggtgacataattacatataacggatgtaaagacaatgaatggatgctagaacaactctctaccctaaactttaacaatctccgcacatggaactcatgtagcataggcaatgtaacgcgtctgttttatacattttttagttatctgatgaaagataaactaaatatataagtataatcccattctaatactttaacctgatgtattagcatcttattagaatattaacctaactaaaagacataacataaaaactcattacatagttgataaaaagcggtaggatataaatattatggctgccaccgttccgcgttttgacgacgtgtacaaaaatgcacaaagaagaattctagatcaagaaacattttttagtagaggtctaagtagaccgttaatgaaaaacacatatctatttgataattacgcgtatggatggataccagaaactgcaatttggagtagtagatacgcaaacttagatgcaagtgactattatcccatttcgttgggattacttaaaaagttcgagtttctcatgtctctatataaaggtcctattccagtatacgaagaaaaagtaaatactgaattcattgctaatggatcgttctctggtagatacgtatcatatcttcgaaagttttctgctcttccaacaaacgagtttattagttttttgttactgacttccattccaatctataatatcttgttctggtttaaaaatactcagtttgatattactaaacacacattattcagatacgtctatacagataatgccaaacacctggcgttggctaggtatatgcatcaaacaggagactataagcctttgtttagtcgtctcaaagagaattatatatttaccggtcccgttccaataggtatcaaagatataaatcaccctaatcttagtagagcaagaagtccatccgattatgagacattagctaatattagtactatattgtactttaccaagtatgatccggtattaatgtttttattgttttacgtacctgggtattcaattactacaaaaattactccagccgtagaatatctaatggataaactgaatctaacaaagagcgacgtacaactgttgtaaattattttatgcttcgtaaaatgtaggttttgaaccaaacattctttcaaagaatgagatgcataaaactttattatccaatagattgactatttcggacgtcaatcgtttaaagtaaacttcgtaaaatattctttgatcactgccgagtttaaaacttctatcgataattgtttcatatgttttaatatttacaagttttttggtccatggtacattagccggacaaatatatgcaaaataatatcgttctccaagttctatagtttctggattatttttattatattcagtaaccaaatacatattagggttatctgcggatttataatttgagtgatgcattcgactcaacataaataattctagaggagacgatctactatcaaattcggatcgtaaatctgtttctaaagaacggagaatatctatacatacctgattagaattcatccgtccttcagacaacatctcagacagtctggtcttgtatgtcttaatcatattcttatgaaacttggaaacatctcttctagtttcactagtacctttattaattctctcaggtacagattttgaattcgacgatgccgagtatttcatcgttgtatatttcttcttcgattgcataatcagattcttatataccgcctcaaactctattttaaaattattaaacaatactctattattaatcagtcgttctaactcctttgctatttctatggacttatctacatcttgactgtctatctctgtaaacacggagtcggtatctccatacacgctacgaaaacgaaatctgtaatctataggcaacgatgttttcacaatcggattaatatctctatcgtccatataaaatggattacttaatggattggcaaaccgtaacataccgttagataactctgctccatttagtaccgattctagatacaagatcattctacgtcctatggatgtgcaactcttagccgaagcgtatgagtatagagcactatttctaaatcccatcagaccatatactgagttggctactatcttgtacgtatattgcatggaatcatagatggccttttcagttgaactggtagcctgttttaacatctttttatatctggctctctctgccaaaaatgttcttaatagtctaggaatggttccttctatcgatctatcgaaaattgctatttcagagatgaggttcggtagtctaggttcacaatgaaccgtaatatatctaggaggtggatatttctgaagcaagagctgattatttatttcttcttccaatctattggtactaacaacgacaccgactaatgtttccggagatagatttccaaagatacacacattaggatacagactgttataatcaaagattaatacattattactaaacattttttgttttggagcaaataccttaccgccttcataaggaaacttttgttttgtttctgatctaactaagatagttttagtttccaacaatagctttaacagtggacccttgatgactgtactcgctctatattcgaataccatggattgaggaagcacatatgttgacgcacccgcgtctgtttttgtttctactccataatactcccacaaatactgacacaaacaagcatcatgaatacagtatctagccatatctaaagctatgtttagattataatccttatacatctgagctaaatcaacgtcatcctttccgaaagataatttatatgtatcattaggtaaagtaggacataatagtacgactttaaatccattttcccaaatatctttacgaattactttacatataatatcctcatcaacagtcacataattacctgtggttaaaacctttgcaaatgcagcggctttgcctttcgcgtccgtagtatcgtcaccgatgaacgtcatttctctaactcctctatttaatactttacccatgcaactgaacgcgttcttggatatagaatccaatttgtacgaatccaatttttcagatttttgaatgaatgaatatagatcgaaaaatatagttccattattgttattaacgtgaaacgtagtattggccatgccgcctactcccttatgactagactgatttctctcataaatacagagatgtacagcttcctttttgtccggagatctaaagataatcttctctcctgttaataactctagacgattagtaatatatctcagatcaaagttatgtccgttaaaggtaacgacatagtcgaacgttagttccaacaattgtttagctattcgtaacaaaactatttcagaacataaaactagttctcgttcgtaatccatttccattagtgactgtatcctcaaacatcctctatcgacggcttcttgtatttcctgttccgttaacatctcttcattaatgagcgtaaacaataatcgtttaccacttaaatcgatataacagtaacttgtatgcgagattgggttaataaatacagaaggaaacttcttatcgaagtgacactctatatctagaaataagtacgatcttgggatatcgaatctaggtatttttttagcgaaacagttacgtggatcgtcacaatgataacatccattgttaatctttgtcaaatattgctcgtccaacgagtaacatccgtctggagatatcccgttagaaatataaaaccaactaatattgagaaattcatccatggtggcattttgtatgctgcgtttctttggctcttctatcaaccacatatctgcgacggagcattttctatctttaatatctagattataacttattgtctcgtcaatgtctatagttctcatctttcccaacggcctcgcattaaatggaggaggagacaatgactgatatatttcgtccgtcactacgtaataaaagtaatgaggaaatcgtataaatacggtctcaccatttcgacatctggatttcagatataaaaatctgttttcaccgtgactttcaaaccaattaatgcaccgaacatccatttatagaatttagaaatatattttcatttaaatgaatcccaaacattggggaagagccgtatggaccattatttttatagtactttcgcaagcgggtttagacggcaacatagaagcgtgtaaacgaaaactatatactatagttagcactcttccatgtcctgcatgtagacggcacgcgactatcgctatagaggacaataatgtcatgtctagcgatgatctgaattatatttattattttttcatcagattatttaacaatttggcatctgatcccaaatacgcgatcgatgtgacaaaggttaaccctttataaacttaacccattataaaacttatgattagtcacgactgaaataaccgcgtgattattttttggtataattctacacggcatggtttctgtgactatgaattcaacccccgttacattagtgaaatctttaacaaacagcaagggttcgtcaaagacataaaactcattgtttacaatcgaaatagaccccctatcacacttaaaataaaaaatatccttatcctttaccaccaaataaaattctgattggtcaatgtgaatgtattcacttaacagttccacaaatttatttattaactccgaggcacatacatcgtcggtattttttatggcaaactttactcttccagcatccgtttctaaaaaaatattaacgagttccatttatatcatccaatattattgaaatgacgttgatggacaaatgatacaaataagaaggtacggtacctttgtccaccatctcctccaattcatgctctattttgtcattaactttaatgtatgaaaacagtacgccacatgcttccatgacagtgtgtaacactttggatacaaaatgtttgacattagtataattgttcaagactgtcaatctataatagatagtagctataatatattctatgatggtattgaagaagatgacaaccttggcatattgatcatttaacacagacatggtatcaacagatagcttgaatgaaagagaatcagtaattggaataagcgtcttctcgatggagtgtccgtataccaacatgtctgatattttgatgtattccattaaattatttagttttttctttttattctcgttaaacagcatttctgtcaacggaccccaacatcgttgaccgattaagttttgattgatttttccgtgtaaggcgtatctagtcagatcgtatagcctatccaataatccatcgtctgtgcgtagatcacatcgtacactttttaattctctatagaagagcgacagacatctggagcaattacagacagcaatttctttattctctacagatgtaagatacttgaagacattcctatgatgatgcagaattttggataacacggtattgatggtatctgttaccataattcctttgatggctgatagtgtcagagcacaagatttccaatctttgacaatttttagcaccattatctttgttttgatatctatatcagacagcatggtgcgtctgacaacacaaggattaagacggaaagatgaaatgattctctcaacatcttcaatggataccttgctattttttctggcattatctatatgtgcgagaatatcctctagagaatcagtatcctttttgatgatagtggatctcaatgacatgggacgtctaaaccttcttattctatcaccagattgcatggtgatttgtcttctttcttttatcataatgtaatctctaaattcatcggcaaattgtctatatctaaaatcataatatgagatgtttacctctacaaatatctgttcgtccaatgttagagtatttacatcagttttgtattccaaattaaacatggcaacggatttaattttatattcctctattaagtcctcgtcgataataacagaatgtagataatcatttaatccatcgtacatggttggaagatgctcgttgacaaaatctttaattgtcttgatgaaggtgggactatatctaacatcttgattaataaaatttataacattgtccataggatactttgtaactagttttatacacatctcttcatcggtaagtttagacagaatatcgtgaacaggtggtatattatattcatcagatatacgaagaacaatgtccaaatctatattgtttaatatattatatagatgtagtgtagctcctacaggaatatctttaactaagtcaatgatttcatcaaccgttagatctattttaaagttaatcatataggcattgatttttaaaaggtatgtagccttgactacattctcattaattaaccattccaagtcactgtgtgtaagaagattatattctatcataagcttgactacatttggtcccgataccattaaagaattcttatgatataaggaaacagattttaggtactcatctactctacaagaattttggagagccttaacgatatcagtgacgtttattatttcaggaggaaaaaacctaacattgagaatatcggaattaatagcttccagatacagtgattttggcaatagtccgtgtaatccataatccagtaacacgagctggtgcttgctagacaccttttcaatgtttaatttttttgaaataagctttgataaagccttcctcgcaaattccggatacatgaacatgtcggcgacatgattaagtattgttttttcattatttttatattttctcaacaagttctcaataccccaatagatgatagaatatcacccaatgcgtccatgttgtctatttccaacaggtcgctatatccaccaatagaagttttcccaaaaaagattctaggaacagttctaccaccagtaatttgttcaaaatagtcacgcaattcattttcgggtttaaattctttaatatcgacaatttcatacgctcctcttttgaaactaaacttatttagaatatccagtgcatttctacaaaaaggacatgtatacttgacaaaaattgtcactttgttattggccaacctttgttgtacaaattcctcggccattttaatatttaagtgatataaaactatctcgacttatttaactctttagtcgagatatatggacgcagatagctatatgatagccaactacagaaggcaaacgctataaaaaacataattacgacgagcatatttataaatatttttattcagcattacttgatatagtaatattaggcacagtcaaacattcaaccactctcgatacattaactctctcattttctttaacaaattctgcaatatcttcgtaaaaagattcttgaaactttttagaatatctatcgactctagatgaaatagcgttcgtcaacatactatgttttgtatacataaaggcgcccattttaacagtttctagtgacaaaatgctagcgatcctaggatcctttagaatcacatagattgacgattcgtctctcttagtaactctagtaaaataatcatacaatctagtacgcgaaataatattatccttgacttgaggagatctaaacaatctagttttgagaacatcgataagttcatcgggaatgacatacatactatctttaatagaactcttttcatccagttgaatggattcgtccttaaccaactgattaatgagatcttctattttatcattttccagatgatatgtatgtccattaaagttaaattgtgtagcgcttctttttagtctagcagccaatactttaacatcactaatatcgatatacaaaggagatgatttatctatggtattaagaattcgtttttcgacatctgtcaaaaccaattcctttttgcctgtatcatccagttttccatcctttgtaaagaaattattttctactagactattaataagactgataaggattcctccataattgcacaatccaaactttttcacaaaactagactttacaagatctacaggaatgcgtacttcaggtttcttagcttgtgattttttcttttgtggacattttcttgtgaccaactcatctaccatttcattgattttagcagtgaaataagctttcaatgcacgggcactgatactattgaaaacgagttgatcttcaaattccgccatttaagttcaccaaacaacttttaaatacaaatatatcaatagtagtagaataagaactataaaaaaaataataattaaccaataccaaccccaacaaccggtattattagttgatgtgactgttttctcatcacttagaacagatttaacaatttctataaagtctgtcaaatcatcttccggagaccccataaatacaccaaatatagcggcgtacaacttatccatttatacattgaatattggcttttctttatcgctatcttcatcatattcatcatcaatatcaacaagtcccagattacgagccagatcttcttctacattttcagtcattgatacacgttcactatctccagagagtccgataacgttagccaccacttctctatcaatgattagtttcttgagtgcgaatgtaatttttgtttccgttccggatctatagaaaactacaggtgtgataattgccttggccaattgtctttctcttttactgagtgattctagttcaccttctatagatctgagaatggatgattctccagtcgaaacatattctaccatggctccgtttaatttgttgatgaagatggattcatccttaaatgttttctctgtaatagtttccaccgaaagactatgcaaagaatttggaatgcgttccttgtgcttaatgtttccatagacggcttctagaagttgatacaacataggactagccgcggtaacttttatttttagaaagtatccatcgcttctatcttgtttagatttatttttataaagtttagtctctccttccaacataataaaagtggaagtcatttgactagataaactatcagtaagttttatagagatagacgaacaattagcgtattgagaagcatttagtgtaacgtattcgatacattttgcattagatttactaatcgattttgcatactctataacacccgcacaagtctgtagagaatcgctagatgcagtaggtcttggtgaagtttcaactctcttcttgattaccttactcatgattaaacctaaataattgtactttgtaatataatgatatatattttcactttatctcatttgagaataaaaatgtttttgtttaaccactgcatgatgtacagatttcggaatcacaaaccaccggtggttttattttatccttgtccaatgtgaattgaatgggagcggatgcgggtttcgtacgtagatagtacattcccgtttttagaccgagactccatccgtaaaaatgcatactcgttagtttggaataactcggatctgctatatggatattcatagattgactttgatcgatgaaggctcccctgtctgcagccatttttatgatcgtcttttgtggaatttcccaaatagttttataaactcgcttaatatcttctggaaggtttgtattctgaatggatccaccatctgccataatcctattcttgatctcatcattccataattttctctcggttaaaactctaaggagatgcggattaactacttgaaattctccagacaatactctccgagtgtaaatattactggtatacggttccaccgactcattatttcccaaaatttgagcagttgatgcagtcggcataggtgccaccaataaactatttctaagaccgtatgttctgattttatcttttagaggttcccaattccaaagatccgacggtacaacattccaaagatcatattgtagaataccgttactggcgtacgatcctacatatgtatcgtatggtccttccttctcagctagttcacaactcgcctctaatgcaccgtaataaatggtttcgaagatcttcttatttagatcttgtgcttccaggctatcaaatggataatttaagagaataaacgcgtccgctaatccttgaacaccaataccgataggtctatgtctcttattagagatttcagcttctggaataggataataattaatatctataattttattgagatttctgacaattactttgaccacatccttcagtttgagaaaatcaaatcgcccatctattacaaacatgttcaaggcaacagatgccagattacaaacggctacctcattagcatccgcatattgtattatctcagtgcaaagattactacacttgatagttcctaaattttgttgattactctttttgttacacgcatccttataaagaatgaatggagtaccagtttcaatctgagattctataatcgctttccagacgactcgagcctttattatagatttgtatctcctttctctttcgtatagtgtatacaatcgttcgaactcgtctccccaaacattgtccaatccaggacattcatccggacacatcaacgaccactctccgtcatccttcactcgtttcataaagagatcaggaatccaaagagctataaatagatctctggttctatgttcctcgtttcctgtattctttttaagatcgaggaacgccataatatcagaatgccacggttccaagtatatggccataactccaggccgtttgtttcctccctgatctatgtatctagcggtgttattataaactctcaacattggaataataccgtttgatataccattggtaccggagatatagcttccactggcacgaatattactaattgatagacctattccccctgccattttagagattaatgcgcatcgttttaacgtgtcatagataccctctatgctatcatcgatcatgttaagtagaaaacagctagacatttggtgacgactagttcccgcattaaataaggtaggagaagcgtgcgtaaaccatttttcagaaagtagattgtacgtctcaatagctgagtctatatcccattgatgaattcctactgcgacacgcattaacatgtgctgaggtctttcaacgatcttgttgtttattttcaacaagtaggatttttccaaagttttaaaaccaaaatagttgtatgaaaagtctcgttcgtaaataataaccgagttgagtttatccttatatttgttaactatatccatggtgatacttgaaataatcggagaatgtttcccatttttaggattaacatagttgaataaatcctccatcacttcactaaatagtttttttgtttccttgtgtagatttgatacggctattctggcggctagaatggcataatccggatgttgtgtagtacaagtggctgctatttcggctgccagagtgtccaattctaccgttgttactccattatatattccttgaataaccttcatagctattttaataggatctatatgatccgtgtttaagccataacataattttctaatacgagacgtgattttatcaaacatgacattttccttgtatccatttcgtttaatgacaaacatttttgttggtgtaataaaaaaattatttaacttttcattaatagggatttgacgtacgtagcgtacaaaatgattgttcctggtatatagataaagagtcctatatatttgaaaatcgttacggctcgattaaactttaatgattgcatagtgaatatatcattaggatttaactccttgactatcagggcggcaccagaaattaccatcaaaagcattaatacagttatgcctatcgcagttagaacggttatagcatccaccatttatatctaaaaattagatcaaagaatatgtgacaaagtcctagttgtatattgagaattgacaaaacaatgtttcttacatattttttttttattagtaaccgacttaatagtaggaactggaaaactagacttgattattctataagtatagatacccttccaaataatattctctttgataaaagttccagaaaatgtagaattttttaaaaagttatcttttgctattaccaagattgtgtttagacgcttattattaatatgagtgatgaaatccacaccgcctctagatatcgcctttatttccacattagatggtaaatccaatagtgaaactatctttttaggaatgtatggactcgcgtttagaggagtgaacgtcttgggcgtcggaaaggatgattcgtcaaacgaataaacaatttcacaaatggatgttaatgtattagtaggaaattttttgacgctagtggaattgaagattctaatggatgatgttctacctatttcatccgataacatgttaatttccgacaccaacggttttaatatttcgatgatatacggtagtctctctttcggacttatatagcttattccacaatacgagtcattatatactccaaaaaacaaaataactagtataaaatctgtatcgaatgggaaaaacgaaattatcgacataggtatagaatccggaacattgaacgtattaatacttaattctttttctgtggtaagtaccgataggttattgacattgtatggttttaaatattctataacttgagacttgatagatattagtgatgaattgaaaattatttttatcaccacgtgtgtttcaggatcatcgtcgacgcccgtcaaccaaccgaatggagtaaaataaatatcattaatatatgctctaaatattagtatttttattaatcctttgattatcatcttctcgtacgcgaatgattccatgatcaagagtgatttgagaacatcctccggagtattaatgggcttagtaaacagtacatcgttgcaataataaaagttatccaagttaaaggatattatgcattcgtttaaagatatcacctcatctgacggagacaattttttggtaggttttagagactttgaagctacttgtttaacaaagttattcatcgtcgtttactattctatttaattttgtagttaatttatcacatatcacattaattgactttttggtccacttttccatacgtttatattcttttaatcctgcgttatccgtttccgttatatccagtgatagatcgtgcaggttaaatagaatgctcttaaataatgtcattttcttatccgctaaaaatttaaagaatgtataaacctttttcagagatttgaaactcttaggtggtgtcctagtacacaatatcataaacaaactaataaacattccacattcagattccaacagctgattaacttctacattaatacagcctattttcgctccaaatgtacattcgaaaaatctgaataaaacatcgatgtcacaatttgtattatccaatacagaatgtctgtgattcgtgttaaaaccatcggagaaggaatagaaataaaaattattatagtggtggaattcagttggaatattgcctccggagtcataaaaggatactaaacattgttttttatcataaattacacatttccaatgagacaaataacaaaatccaaacattacaaatctagaggtagaacttttaattttgtctttaagtatatacgataagatatgtttattcataaacgcgtcaaatttttcatgaatcgctaaggagtttaagaatctcatgtcaaattgtcctatataatccacttcggatccataagcaaactgagagactaagttcttaatacttcgattgctcatccaggctcctctctcaggctctattttcatcttgacgacctttggattttcaccagtatgtattcctttacgtgataaatcatcgattttcaaatccatttgtgagaagtctatcgccttagatactttttcccgtagtcgaggtttaaagaaatacgctaacggtatactagtaggtaactcaaagacatcatatatagaatggtaacgcgtctttaactcgtcggttaactctttcttttgatcgagttcgtcgctactattgggtctgctcaggtgccccaactctactagttccaacatcataccgataggaatacaagacactttgccagcggttgtagatttatcatatttctccactacatatccgttacaatttgttaaaaatttagatacatctatattgctacataatccagctagtgaatatatatgacataataaattggtaaatcctagttctggtattttactaattactaaatctgtatatctttccatttatcatggaaaagaatttaccagatatcttcttttttccaaactgcgttaatgtattctcttacaaatattcacaagatgaattcagtaatatgagtaaaacggaacgtgatagtttctcattggccgtgtttccagttataaaacatagatggcataacgcacacgttgtaaaacataaaggaatatacaaagttagtacagaagcacgtggaaaaaaagtatctcctccatcactaggaaaacccgcacacataaacctaaccgcgaagcaatatatatacagtgaacacacaataagctttgaatgttatagttttctaaaatgtataacaaatacagaaatcaattcgttcgatgagtatatattaagaggactattagaagctggtaatagtttacagatattttccaattccgtaggtaaacgaacagatactataggtgtactagggaataagtatccatttagcaaaattccattggcctcattaactcctaaagcacaacgagagatattttcagcgtggatttctcatagacctgtagttttaactggaggaactggagtgggtaagacgtcacaggtacccaagttattgctttggtttaattatttatttggtggattctctactctagataaaatcactaactttcacgaaagaccagtcattctatctcttcctaggatagctttagttagattgcatagcaataccattttaaaatcattgggatttaaggtactagatggatctcctatttctttacggtacggatctataccggaagaattaataaacaaacaaccaaaaaaatatggaattgtattttctacccataagttatctctaacaaaactatttagttatggcactcttattatagacgaagttcatgagcatgatcaaataggagatattattatagcagtagcgagaaagcatcatacgaaaatagattctatgtttttaatgactgccacgttagaggatgaccgagaacggctaaaagtatttttacctaatcccgcatttatacatattcctggagatacactgtttaaaattagcgaggtatttattcataataagataaatccatcttccagaatggcatacatagaagaagaaaagagaaatttagttactgctatacagatgtatactcctcctgatggatcatccggtatagtctttgtggcatccgttgcacagtgtcacgaatataaatcatatttagaaaaaagattaccgtatgatatgtatattattcatggtaaggtcttagatatagacgaaatattagaaaaagtgtattcatcacctaatgtatcgataattatttctactccttatttggaatccagcgttactatacgcaatgttacacacatttatgatatgggtaaagtttttgtccccgctccttttggaggatcgcaagaatttatttctaaatctatgagagatcaacgaaaaggaagagtaggaagagttaatcctggtacatacgtctatttctatgatctgtcttatatgaagtctatacagcgaatagattcagaatttctacataattatatattgtacgctaataagtttaatctaacactccccgaagatttgtttataatccctacaaatttggatattctatggcgtacaaaggaatatatagactcgttcgatattagtacagaaacatggaataaattattatccaattattatatgaagatgatagagtatgctaaactttatgtactaagtcctattctcgctgaggagttggataactttgagaggacgggagaattaactagtattgtacgagaagccattttatctctaaatttacgaattaagattttaaattttaaacataaagatgatgatacgtatatacacttttgtaaaatattattcggtgtctataacggaacaaacgctactatatattatcatagacctctaacgggatatatgaatatgatttcagatactatatttgttcctgtagataataactaaaaatcaaactctaatgaccacatctttttttagagatgaaaaattttccacatctccttttgtagacacgactaaacattttgcagaaaaaagtttattagtgtttagataatcgtatacttcatcagtgtagatagtaaatgtgaacagataaaaggtattcttgctcaatagattggtaaattccatagaatatattaatcctttcttcttgagatcccacatcatttcaaccagagacgttttatccaatgatttacctcgtactataccacatacaaaactagattttgcagtgacgtcgtacctggtattcctaccaaacaaaattttacttttagttcttttagaaaattctaaggtagaatctctatttgccaatatgtcatctatggaattaccactagcaaaaaatgatagaaatatatattgatacatcgcagctggttttgatctactatactttaaaaacgaatcagattccataattgcctgtatatcatcagctgaaaaactatgttttacacgtattccttcggcatttctttttaatgatatatcttgtttagacaatgataaagttatcatgtccatgagagacgcgtctccgtatcgtataaatatttcattagatgttagacgcttcattaggggtatacttctataaggtttcttaattagtccatcatttgttgcgtcaagaactactatcggatgttgttgggtatctctagtgttacacatggccttactaaagtttgggtaaataactatgatatctctattaattatagatgcatatatttcatttgtcaaggatattagtatcgacttgctatcgtcattaatacgtgtaatgtaatcatataaatcatgcgatagccaaggaaaattcaaatagatgttcatcatataatcgtcgctataattcatattaatactttgacattgactaatttgtaatatagcctcgccacgaagaaagctctcgtattcagtttcatcgataaaggataccgttaaatataactggttgccgatagtctcatagtctattaagtggtaagtttcgtacaaatacagaatccctaaaatattatctaatgttggattaatctttaccataactgtataaaatggagacggagtcataactattttaccgtttgtacttactggaatagacgaaggaataatctccggacatgctggtaaagacccaaatgtctgtttgaagaaatccaatgttccaggtcctaatctcttaacaaaaattacgatattcgatcccgatatcctttgcattctatttaccagcatatcacgaactatattaagattatctatcatgtctattctcccaccgttatataaatcgcctccgctaagaaacgttagtatatccatacaatggaatacttcatttctaaaatagtattcgttttctaattctttaatgtgaaatcgtatactagaaagggaaaaattatctttgagttttccgttagaaaagaaccacgaaactaatgttctgattgcgtccgattccgttgctgaattaatggatttacaccaaaaactcatataacttctagatgtagaagcattcgctaaaaaattagtagaatcaaaggatataagtagatgttccaacaagtgagcaattcccaagatttcatctatatcattctcgaatccgaaattagaaattcccaagtagatatcctttttcatccgatcgttgatgaaaatacgaactttattcggtaagacaatcatttactaaggagtaaaataggaagtaatgttcgtatgtcgttatcatcgtataaattaaaggtgtgttttttaccattaagtgacattataattttaccaatattggaattataatataggtgtatttgcgcactcgcgacggttgatgcatcggtaaatatagctgtatctaatgttctagtcggtatttcatcatttcgctgtctaataatagcgttttctctatctgtttccattacagctgcctgaagtttattggtcggataatatgtaaaataataagaaatacatacgaataacaaaaataaaataagatataataaagatgccatttagagatctaattttgtttaacttgtccaaattcctacttacagaagatgaggaatcgttggagatagtgtcttccttatgtagaggatttgaaatatcttatgatgacttgataacttactttccagataggaaataccataaatatatttctaaagtatttgaacatgtagatttatcggaggaattaagtatggaattccatgatacaactctgagagatttagtctatcttagattgtacaagtattccaagtgtatacggccgtgttataaattaggagataatctaaaaggcatagttgttataaaggacaggaatatttatattagagaagcaaatgatgacttgatagaatatctcctcaaggaatacactcctcagatttatacatattctaatgagcgcgtccccataactggttcaaaattaattctttgtggattttctcaagttacatttatggcgtatacaacgtcgcatataacaacaaataaaaaggtagatgttctcgtttccaaaaaatgtatagatgaactagtcgatccaataaattatcaaatacttcaaaatttatttgataaaggaagcggaacaataaacaaaatactcaggaagatattttattcggtaaccggtggccaaactccataatttgctttttctatttcggattttagaatttccaaattcaccagcgatttatcggttttggtgaaatccaaggatttattaatgtccacaaatgccatttgttttgtctgtggattgtatttgaaaatggaaacgatgtagttagatagatgcgctgcaaagtttcctattagggttccgcgctttacgtcacccagcatacttgaatcaccatcctttaaaaaaaatgataagatatcaacatggagtatatcatactcggattttaattcttctactgcatcactgacattttcacaaatactacaatacggtttaccgaaaataatcagtacgttcttcatttatgggtatcaaaaacttaaaatcgttactgctggaaaataaatcactgacgatattagatgataatttatacaaagtatacaatggaatatttgtggatacaatgagtatttatatagccgtcgccaattgtgtcagaaacttagaagagttaactacggtattcataaaatacgtaaacggatgggtaaaaaagggagggcatgtaaccctttttatcgatagaggaagtataaaaattaaacaagacgttagagacaagagacgtaaatattctaaattaaccaaggacagaaaaatgctagaattagaaaagtgtacatccgaaatacaaaatgttaccggatttatggaagaagaaataaaggcagaaatgcaattaaaaatcgataaactcacatttcaaatatatttatctgattctgataacataaaaatatcattgaatgagatactaacacatttcaacaataatgagaatgttacattattttattgtgatgaacgagacgcagaattcgttatgtgtctcgaggctaaaacacatttctctaccacaggagaatggccgttgataataagtaccgatcaggatactatgctatttgcatctactgataatcatcctaagatgataaaaaacttaactcaactgtttaaatttgttccctcggcagaggataactatttagcaaaattaacggcgttagtgaatggatgtgatttctttcctggactctatggggcatctataacacccaccaacttaaacaaaatacaattgtttagtgattttacaatcgataatatagtcactagtttggcaattaaaaattattatagaaagactaactctaccgtagacgtgcgtaatattgttacgtttataaacgattacgctaatttagacgatgtctactcgtatgttcctccttgtcaatgcactgttcaagaatttatattttccgcattagatgaaaaatggaacaattttaaatcatcttatttagagaccgttccgttaccctgccaattaatgtatgcattagaaccacgcaaggagattgatgtttcagaagttaaaactttatcatcttatatagatttcgaaaatactaaatcagatatcgatgttataaaatctatatcttcgatcttcggatattctaacgaaaactgtaacactatagtgttcggcatctataaggataatttactactgagtataaatagttcattttactttaacgatagtctgttaataaccaatactaaaagtgataatataataaatataggttactagattaaaaatggtgttccaactcgtgtgctctacatgcggcaaagatatttctcacgaacgatataaattgattatacgaaaaaaatcattaaaggatgtactcgtcagtgtaaagaacgaatgttgtaggttaaaattatctacacaaatagaacctcaacgtaacttaacagtgcaacctctattggatataaactaatatggatccggttaattttatcaagacatatgcgcctagaggttctattatttttattaattataccatgtcattaacaagtcatttgaatccatcgatagaaaaacatgtgggtatttattatggtacgttattatcggaacacttggtagttgaatctacctatagaaaaggagttcgaatagtcccattggatagtttttttgaaggatatcttagtgcaaaagtatacatgttagagaatattcaagttatgaaaatagcagctgatacgtcattaactttattgggtattccgtatggatttggtcatgatagaatgtattgttttaaattggtagctgaatgttataaaaatgccggtattgatacatcgtctaaacgaatattaggtaaagatatttttctgagccaaaacttcacagatgataatagatggataaagatatatgattctaataatttaacattttggcaaattgattaccttaaagggtgagttaatatgcataactactcctccgttgttttttccctcgttctttttcttaacgttgtttgccatcactctcataatgtaaagatattctaaaatggtaaacttttgcatatcggacgcagaaattggtataaatgttgtaattgtattatttcccgtcaatggactagtcacagctccatcagttttatatcctttagagtatttctcactcgtgtctaacattctagagcattccatgatctgtttatcgttgatattggccggaaagatagattttttattttttattatattactattggcaattgtagatataacttctggtaaatatttttctaccttttcaatctcttctattttcaagccggctatatattctgctatattgttgctagtatcaataccttttctggctaagaagtcatatgtggtattcactatatcagttttaactggtagttccattagcctttccacttctgcagaataatcagaaattggttctttaccagaaaatccagctactataataggctcaccgatgatcattggcaaaatcctatattgtaccagattaatgagagcatatttcatttccaataattctgctagttcttgagacattgatttatttgatgaatctagttggttctctagatactctaccatttctgccgcatacaataacttgttagataaaatcagggttatcaaagtgtttagcgtggctagaatagtgggcttgcatgtattaaagaatgcggtagtatgagtaaaccgttttaacgaattatatagtctccagaaatctgtggcgttacatacatgagccgaatgacatcgaagattgtccaatatttttaatagctgctctttgtccattatttctatatttgactcgcaacaattgtagataccattaatcaccgattcctttttcgatgccggacaatagcacaattgtttagctttggactctatgtattcagaattaatagatatatctcttaatacagattgcactatacattttgaaactatgtcaaaaattgtagaacgacgctgttctgcagccatttaactttaaataatttacaaaaatttaaaatgagcatccgtataaaaatcgataaactgcgccaaattgtggcatatttttcagagttcagtgaagaagtatctataaatgtagactcgacggatgagttaatgtatatttttgccgccttgggcggatctgtaaacatttgggccattatacctctcagtgcatcagtgttctaccgcggagccgaaaacattgtgtttaatcttcctgtgtccaaggtaaaatcgtgtttgtgtagttttcacaatgatgccatcatagatatagaacctgatctggaaaataatctagtaaaactttctagttatcatgtagtaagtgtcgattgtaacaaggaactgatgcctattaggacagatactactatttgtctaagtatagatcaaaagaaatcttacgtgtttaattttcacaagtatgaagaaaaatgttgtggtagaaccgtcattcatttagaatggttgttgggctttatcaagtgtattagtcagcatcagcatttggctattatgtttaaagatgacaatattattatgaagactcctggtaatactgatgcgttttccagggaatattctatgactgaatgttctcaagaactacaaaagttttctttcaaaatagctatctcgtctctcaacaaactacgaggattcaaaaagagagtcaatgtttttgaaactagaatcgtaatggataatgacgataacattctaggaatgttgttttcggatagagttcaatcctttaagatcaacatctttatgacgtttttagattaatactttcaatgagataaatatgggtggcggagtaagtgttgagctccctaaacgggatccgcctccgggagtacccactgatgagatgttattaaacgtggataaaatgcatgacgtgatagctcccgctaagcttttagaatatgtgcatataggaccactagcaaaagataaagaggataaagtaaagaaaagatatccagagtttagattagtcaacacaggacccggtggtctttcggcattgttaagacaatcgtataatggaaccgcacccaattgctgtcgcacttttaatcgtactcattattggaagaaggatggaaagatatcagataagtatgaagagggtgcagtattagaatcgtgttggccagacgttcacgacaccggaaaatgcgatgttgatttattcgactggtgtcagggggatacgttcgatagaaacatatgccatcagtggatcggttcagcctttaataggagtaatagaactgtagagggtcaacaatcgttaataaatctgtataataagatgcaaacattatgtagtaaagatgctagtgtaccaatatgtgaatcatttttgcatcatttacgcgcacacaatacagaagatagcaaagagatgatcgattatattctaagacaacagtctgcggactttaaacagaaatatatgagatgtagttatcccactagagataagttagaagagtcattaaaatatgcggaacctcgagaatgttgggatccagagtgttcgaatgccaatgttaatttcttgctaacacgtaattataataatttaggactttgcaatattgtacgatgtaatactagcgtgaacaacttacagatggataaaacttcctcattaagattgtcatgtggattaagcaatagtgatagattttctactgttcccgtcaatagagcaaaagtagttcaacataatattaaacactcgttcgacctaaaattgcatttgatcagtttattatctctcttggtaatatggatactaattgtagctatttaaatgggtgccgcggcaagcatacagacgacggtgaatacactcagcgaacgtatctcgtctaaattagaacaagaagcgaatgctagtgctcaaacaaaatgtgatatagaaatcggaaatttttatatccgacaaaaccatggatgtaacctcactgttaaaaatatgtgctctgcggacgcggatgctcagttggatgctgtgttatcagccgctacagaaacatatagtggattaacaccggaacaaaaagcatacgtgccagctatgtttactgctgcgttaaacattcagacgagtgtaaacactgttgttagagattttgaaaattatgtgaaacagacttgtaattctagcgcggtcgtcgataacaaattaaagatacaaaacgtaatcatagatgaatgttacggagccccaggatctccaacaaatttggaatttattaatacaggatctagcaaaggaaattgtgccattaaggcgttgatgcaattgacgactaaggccactactcaaatagcacctaaacaagttgctggtacaggagttcagttttatatgattgttatcggtgttataatattggcagcgttgtttatgtactatgccaagcgtatgttgttcacatccaccaatgataaaatcaaacttattttagccaataaggaaaacgtccattggactacttacatggacacattctttagaacttctccgatggttattgctaccacggatatgcaaaactgaaaatatattgataatattttaatagattaacatggaagttatcactgatcgtctagacgatatagtgaaacaaaatatagcggatgaaaaatttgtagattttgttatacacggtctagagcatcaatgtcctgctatacttcgaccattaattaggttgtttattgatatactattatttgttatagtaatttatatttttacggtacgtctagtaagtagaaattatcaaatgttgttggcgttggtggcgctagtcatcacattaactattttttattactttatactataatagtactagactgacttctaacaaacatctcacctgccataaataaatgcttgatattaaagtcttctatttctaacactattccatctgtggaaaataatactctgacattatcgctaattgacacatcggtgagtgatatgcctataaagtaataatcttctttgggcacatataccagtgtaccaggttctaacaacctatttactggtgctcctatagcatactttttctttaccttgagaatatccatcgtttgcttggtcaatagcgatatgtgattttttatcaaccactcgaaaaagtaattggagtgttcatatcctctacgggctattgtctcatggccgtgtatgaaatttaagtaacacgactgtggtagatttgttctatagagccggttgccgcaaatagatagaactaccaatatgtctgtacaaatgttaaacattaattgattaacagaaaaaacaatgttcgttctgggaatagaaaccagatcaaaacaaaattcgttagaatatatgccacgtttatacattgaatataaaataactacagtttgaaaaataacagtatcatttaaacatttaacttgcggggttaatctcacaactttactgtttttgaactgttcaaaatatagcatagatccgtgagaaatacgtttagccgcctttaatagaggaaatcccaccgcctttctggatctcaccaacgacgatagttctgaccagcaactcatttcttcatcatccacctgttttaacatataataggcaggagatagatatccgtcattgcaatattccttctcgtaggcacacaatctaatattgataaaatctccattctcttctctgcatttattatcttgtttcggtggctgattaggctgtagtcttggtttaggctttggtatatcgttgttgaatctattttggtcattaaatctttcatttcttcctggtatatttttatcacctcgtttggttggatttttgtctatattatcgtttgtaacatcggtacgggtattcatttatcacaaaaaaaacttctctaaatgagtctactgctagaaaacctcatcgaagaagataccatattttttgcaggaagtatatctgagtatgatgatttacaaatggttattgccggcgcaaaatccaaatttccaagatctatgctttctatttttaatatagtacctagaacgatgtcaaaatatgagttggagttgattcataacgaaaatatcacaggagcaatgtttaccacaatgtataatataagaaacaatttgggtctaggagatgataaactaactattgaagccattgaaaactatttcttggatcctaacaatgaagttatgcctcttattattaataatacggatatgactgccgtcattcctaaaaaaagtggtaggagaaagaataagaacatggttatcttccgtcaaggatcatcacctatcttgtgtattttcgaaactcgtaaaaagattaatatttataaagaaaatatggaatccgcgtcgactgagtatacacctatcggagacaacaaggctttgatatctaaatatgcgggaattaatgtcctgaatgtgtattctccttccacatccatgagattgaatgccatttacggattcaccaataaaaataaactagagaaacttagtactaataaggaactagaatcgtatagttctagccctcttcaagaacccattaggttaaatgattttctgggactattggaatgtgttaaaaagaatattcctctaacagatattccgacaaaggattgattactataaatggagaatgttcctaatgtatactttaatcctgtgtttatagagcccacgtttaaacattctttattaagtgtttataaacacagattaatagttttatttgaagtattcgttgtattcattctaatatatgtattttttagatctgaattaaatatgttctttatgcctaaacgaaaaatacccgatcctattgatagattacgacgtgctaatctagcgtgtgaagacgataaattaatgatctatggattaccatggatgacaactcaaacatctgcgttatcaataaatagtaaaccgatagtgtataaagattgtgcaaagcttttgcgatcaataaatggatcacaaccagtatctcttaacgatgttcttcgcagatgatgattcattttttaagtatttggctagtcaagatgatgaatcttcattatctgatatattgcaaatcactcaatatctagactttctgttattattattgatccaatcaaaaaataaattagaagccgtgggtcattgttatgaatctctttcagaggaatacagacaattgacaaaattcacagactttcaagattttaaaaaactgtttaacaaggtccctattgttacagatggaagggtcaaacttaataaaggatatttgttcgactttgtgattagtttgatgcgattcaaaaaagaatcctctctagctaccaccgcaatagatcctattagatacatagatcctcgtcgtgatatcgcattttctaacgtgatggatatattaaagtcgaataaagtgaacaataattaattctttattgtcatcatgaacggcggacatattcagttgataatcggccccatgttttcaggtaaaagtacagaattaattagacgagttaaacgttatcaaatagctcaatataaatgcgtgactataaaatattctaacgataatagatacggaacgggactatggacgcatgataagaataattttgaagcattggaagcaactaaactatgcgatgttttggaattaattacagatttctccgtgataggtatcgatgaaggacagttctttccagacattgttgaattctgtgagcgtatggcaaacgaaggaaaaatagttatagtagccgcactcgatgggacatttcaacgtaaaccgtttaataatattttgaatcttattccattatctgaaatggtggtaaaactaactgctgtgtgtatgaaatgctttaaggaggcttccttttctaaacgattgggtgaggaaaccgagataaaaataataggaggtaatgatatgtatcaatcggtgtgtagaaagtgttacatcgactcataatattatattttttatctaaaaaactaaaaataaacattgattaaattttaatataatacttaaaaatggatgttgtgtcgttagataaaccgtttatgtattttgaggaaattgataatgagttagattacgaaccagaaagtgcaaatgaggtcgcaaaaaaactgccgtatcaaggacagttaaaactattactaggagaattattttttcttagtaagttacagcgacacggtatattagatggtgccaccgtagtgtatataggatctgctcccggtacacatatacgttatttgagagatcatttctataatttaggagtgatcatcaaatggatgctaattgacggccgccatcatgatcctattttaaatggattgcgtgatgtgactctagtgactcggttcgttgatgaggaatatctacgatccatcaaaaaacaactgcatccttctaagattattttaatttctgatgtgagatccaaacgaggaggaaatgaacctagtacggcggatttactaagtaattacgctctacaaaatgtcatgattagtattttaaaccccgtggcgtctagtcttaaatggagatgcccgtttccagatcaatggatcaaggacttttatatcccacacggtaataaaatgttacaaccttttgctccttcatattcagctgaaatgagattattaagtatttataccggtgagaacatgagactgactcgagttaccaaattagacgctgtaaattatgaaaaaaagatgtactaccttaataagatcgtccgtaacaaagtagttgttaactttgattatcctaatcaggaatatgactattttcacatgtactttatgctgaggaccgtgtactgcaataaaacatttcctactactaaagcaaaggtactatttctacaacaatctatatttcgtttcttaaatattccaacaacatcaactgaaaaagttagtcatgaaccaatacaacgtaaaatatctagcaaaaattctatgtctaaaaacagaaatagcaagagatccgtacgcggtaataaatagaaacgtgctactgagatatactaccgatatagagtataatgatttagttactttaataaccgttagacataaaattgattctatgaaaactgtgtttcaggtatttaacgaatcatccataaattatactccggttgatgatgattatggagaaccaatcattataacatcgtatcttcaaaaaggtcataacaagtttcctgtaaattttctatacatagatgtggtaatatctgacttatttcctagctttgttagactagatactacagaaactaatatagttaatagtgtactacaaacaggtgatggtaaaaagactcttcgtcttcccaaaatgttagagacggaaatagttgtcaagattctctatcgccctaatataccattaaaaattgttagatttttccgcaataacatggtaactggagtagagatagccgatagatctgttatttcagtcgctgattaatcaattagtagagatgagataagaacattataataatcaataatatatcttatatcttatatcttatatcttatatcttgtttagaaaaatgctaatattaaaatagctaacgctagtaatccaatcggaagccatttgatatctataatagggtatctaatttcctgatttaaatagcggacagctatattctcggtagctactcgtttggaatcacaaacattatttacatctaatttactatctgtaatggaaacgtttcccaatgaaatggtacaatccgatacattgcattttgttatatttttttttaaagaggctggtaacaacgcatcgcttcgtttacatggctcgtaccaacaataatagggtaatcttgtatctattcctatccgtactatgcttttatcaggataaatacatttacatcgtatatcgtctttgttagcatcacagaatgcataaatttgttcgtccgtcatgataaaaatttaaagtgtaaatataactattatttttatagttgtaataaaaagggaaatttgattgtatactttcggttctttaaaagaaactgacttgataaaaatggctgtaatctctaaggttacgtatagtctatatgatcaaaaagagattaatgctacagatattatcattagtcatgttaaaaatgacgacgatatcggtaccgttaaagatggtagactaggtgctatggatggggcattatgtaaaacttgtgggaaaacggaattggaatgtttcggtcactggggtaaagtaagtatttataaaactcatatagttaagcctgaatttatttcagaaattattcgtttactgaatcatatatgtattcactgcggattattgcgttcacgagaaccgtattccgacgatattaacctaaaagagttatcgggacacgctcttaggagattaaaggataaaatattatccaagaaaaagtcatgttggaacagcgaatgtatgcaaccgtatcaaaaaattactttttcaaagaaaaaggtttgtttcgtcaacaagttggatgatattaacgttcctaattctctcatctatcaaaagttaatttctattcatgaaaagttttggccattattagaaattcatcaatatccagctaacttattttatacagactactttcccatccctccgctgattattagaccggctattagtttttggatagatagtatacccaaagaaaccaatgaattaacttacttattaggtatgatcgttaagaattgtaacttgaatgctgatgaacaggttatccagaaggcggtaatagaatacgatgatattaaaattatttctaataacactaccagtatcaatttatcatatatcacatccggcaaaaataatatgattagaagttatatcgtcgcccggcgaaaagatcagaccgctagatctgtaattggtcccagtacatctatcaccgttaatgaggtaggaatgcccgcatatattagaaatacacttacagaaaagatatttgttaatgcctttacagtggataaagttaaacaactattagcgtcaaaccaagttaaattttactttaataaacgattaaaccaattaacaagaatacgccaaggaaagtttatcaaaaataaaatacatttattgcctggtgattgggtagaagtagctgttcaagaatatacaagtattatttttggaagacagccgtctctacatagatacaacgtcatcgcttcatctatcagagctaccgaaggagatactatcaaaatatctcccggaattgccaactctcaaaatgctgatttcgacggggatgaggaatggatgatattagaacaaaatcctaaagctgtaattgaacaaagtattcttatgtatccgacgacgttactcaaacacgatattcatggagcccccgtttatggatctattcaagatgaaatcgtagcagcgtattcattgtttaggatacaagatctttgtttagatgaagtattgaacatcttggggaaatatggaagagagttcgatcctaaaggtaaatgtaaattcagcggtaaagatatctatacttacttgataggtgaaaagattaattatccgggtctcttaaaggatggtgaaattattgcaaacgacgtagatagtaattttgttgtggctatgaggcatctgtcattggctggactcttatccgatcataagtcgaacgtggaaggtatcaactttattatcaagtcatcttatgtttttaagagatatctatctatttacggttttggggtgacattcaaagatctgagaccaaattcgacgttcactaataaattggaggccatcaacgtagaaaaaatagaacttatcaaagaagcatacgccaaatatctcaacgatgtaagagacgggaaaatagttccattatctaaagctttagaggcggactatgtggaatccatgttatccaacttgacaaatcttaatatccgagagatagaagaacatatgagacaaacgctgatagatgatccagataataacctcctgaaaatggccaaagcgggttataaagtaaatcctacagaactaatgtatattctaggtacgtatggacaacaaaggattgatggtgaaccagcagagactcgagtattgggtagagtcttaccttactatcttccagactctaaggatccagaaggaagaggttacattcttaattctttaacaaaaggattaacgggttctcaatattacttttcgatgctggttgcaagatctcaatctactgatatcgtctgtgaaacatcacgtaccggaacactggctagaaaaatcattaaaaagatggaggatatggtggtcgacggatacggacaagtagttataggtaatacgctcatcaagtacgccgccaattataccaaaattctaggctcagtatgtaaacctgtagatcttatctatccagatgagtccatgacttggtatttggaaattagtgctctgtggaataaaataaaacagggattcgtttactctcagaaacagaaacttgcaaagaagacattggcgccgtttaatttcctagtattcgtcaaacccaccactgaggataatgctattaaggttaaggatctgtacgatatgattcataacgtcattgatgatgtgagagagaaatacttctttacggtatctaatatagattttatggagtatatattcttgacgcatcttaatccttctagaattagaattacaaaagaaacggctatcactatctttgaaaagttctatgaaaaactcaattatactctaggtggtggaactcctattggaattatttctgcacaggtattgtctgagaagtttacacaacaagccctgtccagttttcacactactgaaaaaagtggtgccgtcaaacaaaaacttggtttcaacgagtttaataacttgactaatttgagtaagaataagaccgaaattatcactctggtatccgatgatatctctaaacttcaatctgttaagattaatttcgaatttgtatgtttgggagaattaaatccagacatcactcttcgaaaagaaacagataggtatgtagtagatataatagtcaatagattatacatcaagagagcagaaattaccgaattagtcgtcgaatatatgattgaacgatttatctcctttagcgtcattgtaaaggaatggggtatggaaacattcattgaggatgaggataatattagatttactgtctacctaaatttcgttgaaccggaagaattgaatcttagtaagtttatgatggttcttccgggtgccgccaacaagggcaagattagtaaattcaagattcctatctctgactatacgggatatgacgacttcaatcaaacaaaaaagctcaataagatgactgtagaactcatgaatctaaaagaattgggttctttcgatttggaaaacgtcaacgtgtatcctggagtatggaatacatacgatatcttcggtatcgaggccgctcgtgaatacttgtgcgaagccatgttaaacacctatggagaagggttcgattatctgtatcagccttgtgatcttctcgctagtttactatgtgctagttacgaaccagaatcagtgaataaattcaagttcggcgcagctagtactcttaagagagctacgttcggagacaataaagcattgttaaacgcggctcttcataaaaagtcagaacctattaacgataatagtagctgccacttttttagcaaggtccctaatataggaactggatattacaaatactttatcgacttgggtcttctcatgagaatggaaaggaaactatctgataagatatcttctcaaaagatcaaggaaatggaagaaacagaagacttttaattcttatcaataacatatttttctatgatctgtcttttaaacgatggattttccacaaatgcgcctctcaagtccctcatagaatgatacacgtataaaaaatatagcataggcaatgactccttatttttagacattagatatgccaaaatcatagccccgcttctatttactcccgcagcacaatgaaccaacacgggctcgtttcgttgatcacatttagataaaaaggcggttacgtcgtcaaaatatttactaatatcggtagttgtatcatctaccaacggtatatgaataatattaatattagagttaggtaatgtatatttatccatcgtcaaatttaaaacatatttgaacttaacttcagatgatggtgcatccatagcatttttataatttcccaaatacacattattggttacccttgtcattatagtgggagatttggctctgtgcatatctccagttgaacgtagtagtaagtatttatacaaacttttcttatccatttataacgtacaaatggataaaactactttatcggtaaacgcgtgtaatttagaatacgttagagaaaaggctatagtaggcgtacaagcagccaaaacatcaacacttatattctttgttattatattggcaattagtgcgctattactctggtttcagacgtctgataatccagtctttaatgaattaacgagatatatgcgaattaaaaatacggttaacgattggaaatcattaacggatagcaaaacaaaattagaaagtgatagaggtagacttctagccgctggtaaggatgatatattcgaattcaaatgtgtggatttcggcgcctattttatagctatgcgattggataagaaaacatatctgccgcaagctattaggcgaggtactggagacgcgtggatggttaaaaaggcggcaaaggtcgatccatctgctcaacaattttgtcagtatttgataaaacacaagtctaataatgttattacttgtggtaatgagatgttaaatgaattaggttatagcggttattttatgtcaccgcattggtgttccgattttagtaatatggaatagtgttagataaatgcggtaacgaatgttcctgtaaggaaccataacagtttagatttaacgttaaagatgagcataaacataataaacaaaattacaatcaaacctataacattaatatcaaacaatccaaaaaatgaaatcagtggagtagtaaacgcgtacataactcctggataacgtttagtagctgccgttcctattctagaccaaaaattcggtttcatgttttcgaaacggtgttctgcaacaagtcggggatcgtgttctacatatttggcggcattatccagtatctgcctattgatcttcatttcgttttcaattctggctatttcaaaataaaatcccgatgatagacctccagactttataatttcatctacgatgttcagcgccgtagtaactctaataatataggctgataagctaacatcataccctcctgtatatgtgaatatggcatgatttttgtccattacaagctcggttttaactttattgcctgtaataatttctctcatctgtaggatatctatttttttgtcatgcattgccttcaagacgggacgaagaaacgtaatatcctcaataacgttatcgttttctacaataactacatattctacctttttattttctaactcggtaaaaaaattagaatcccatagggctaaatgtctagcgatatttcttttcgtttcctctgtacacatagtgttacaaaaccctgaaaagaagtgagtatacttgtcatcatttctaatgtttcctccagtccactgtataaacgcataatccttgtaatgatctggatcatccttgactaccacaacatttcttttttctggcataacttcgttgtcctttacatcatcgaacttctgatcattaatatgctcatgaacattaggaaatgtttctgatggaagtctatcaataactggcacaacaataacaggagttttcgccgccgccatttagttattgaaattaatcatatacaactctttaatacgagttatattttcgtctatccattgtttcacatttacatatttcgacaaaaagatataaaatgcgtattccaatgcttctctgtttaatgaattactaaaatatacaaacacgtcactgtctggcaataaatgatatcttagaatattgtaacaatttattttgtattgcacatgttcgtgatctatgagttcttcttcgaatggcataggatctccgaatctgaaaacgtataaataggagttagaataataatatttgagagtattggtaatatataaactctttagcggtataattagtttttttctctcaatttctatttttagatgtgatggaaaaatgactaattttgtagcattagtatcatgaactctaatcaaaatcttaatatcttcgtcacacgttagctctttgaagtttttaagagatgcatcagttggttcgaccgatggagtaggtgcaacaattttttgttcgatgtatgtatgtactggagccattgttttaactataatggtgcttgtatcgaaaaactttaatgcagatagcggaagctcttcgccgcgactttctacatcgtaattgggttctaacgccgatctctgaatggatactagttttctaagttctaatgtgattctctgaaaatgtaaatccaattcctccggcattatagatgtgtatacatcggtaaataaaactatagtatccaacgatcccttctcgcaaattctagtcttaaccaaaaaatcgtatataaccacggagatggcgtatttaagagtggattcttctaccgttttgttcttggatgtcatataggaaactataaagtccgcactactgttaagaatgattactaacgcaactatatagttcaaattaagcattttggaaacataaaataactctgtagacgatacttgactttcgaataagtttgcagacaaacgaagaaagaacagacctctcttaatttcagaagaaaactttttttcgtattcctgacgtctagagtttatatcaataagaaagttaagaattagtcggttaatgttgtatttcattacccaagtttgagatttcataatattatcaaaagacatgataatattaaagataaagcgctgactatgaacgaaatagctatatggttcgctcaaaaatatagtcttgttaaacgtggaaacgataactgtatttttaatcacgtcagcggcatctaaattaaatataggtatatttattccacacactctacaatatgccacaccatcttcataataaataaattcgttagcaaaattattaattttagtgaaatagttagcgtcaactttcatagcttccttcaatctaatttgatgctcacacggtgcgaattccactctaacatcccttttccatgcctcaggttcatcgatctctataatatctagttttttgcgtttcacaaacacaggctcgtctctcgcgatgagatctgtatagtaactatgtaaatgataactagatagaaagatgtagctatatagatgacgatcctttaagagaggtataataactttaccccaatcagatagactgttgttatggtcttcggaaaaagaatttttataaatttttccagtattttccaaatatacgtacttaacatctaaaaaatccttaatgataataggaatggataatccgtctattttataaagaaatacatatcgcacattatacttttttttggaaatgggaataccgatgtgtctacataaatatgcaaagtctaaatattttttagagaatcttaattggtccaaattcttttccaagtacggtaatagatttttcatattgaacggtatcttcttaatctctggttctagttccgcattaaatgatgaaactaagtcactatttttataactaacgattacatcacctctaacatcatcatttaccagaatactgatcttcttttgtcgtaaatacatgtctaatgtgttaaaaaaaagatcatacaagttatacgtcatttcatctgtggtattcttgtcattgaaggataaactcgtactaatctcttctttaacagcctgttcaaatttatatcctatatacgaaaaaatagcaaccagtgtttgatcatccgcgtcaatattctgttctatcgtagtgtataacaatcgtatatcttcttctgtgatagtcgatacgttataaaggttgataacgaaaatatttttatttcgtgaaataaagtcatcgtaggattttggacttatattcgcgtctagtagatatgcttttatttttggaatgatctcaattagaatagtctctttagagtccatttaaagttacaaacaactaggaaattggtttatgatgtataatttttttagtttttatagattctttattctatacttaaaaaatgaaaataaatacaaaggttcttgagggttgtgttaaattgaaagcgagaaataatcataaattatttcattatcgcgatatccgttaagtttgtatcgtaatggcgtggtcaattacgaataaagcggatactagtagcttcacaaagatggctgaaatcagagctcatctaaaaaatagcgctgaaaataaagataaaaacgaggatattttcccggaagatgtaataattccatctactaagcccaaaaccaaacgagccactactcctcgtaaaccagcggctactaaaagatcaaccaaaaaggaggaagtggaagaagaagtagttatagaggaatatcatcaaacaactgaaaaaaattctccatctcctggagtcagcgacattgtagaaagcgtggccgctgtagagctcgatgatagcgacggggatgatgaacctatggtacaagttgaagctggtaaagtaaatcatagtgctagaagcgatctttctgacctaaaggtggctaccgacaatatcgttaaagatcttaagaaaattattactagaatctctgcagtatcgacggttctagaggatgttcaagcagctggtatctctagacaatttacttctatgactaaagctattacaacactatctgatctagtcaccgagggaaaatctaaagttgttcgtaaaaaagttaaaacttgtaagaagtaaatgcgtgcacttttttataaagatggtaaactctttaccgataataattttttaaatcctgtatcagacgataatccagcgtatgaggttttgcaacatgttaaaattcctactcatttaacagatgtagtagtatatgaacaaacgtgggaggaggcgttaactagattaatttttgtgggaagcgattcaaaaggacgtagacaatacttttacggaaaaatgcatgtacagaatcgcaacgctaaaagagatcgtatttttgttagagtatataacgttatgaaacgaattaattgttttataaacaaaaatataaagaaatcgtccacagattccaattatcagttggcggtttttatgttaatggaaactatgttttttattagatttggtaaaatgaaatatcttaaggagaatgaaacagtagggttattaacactaaaaaataaacacatagaaataagtcccgatgaaatagttatcaagtttgtaggaaaggacaaagtttcacatgaatttgttgttcataagtctaatagactatataaaccgctattgaaactgacggatgattctagtcccgaagaatttctgttcaacaaactaagtgaacgaaaggtatacgaatgtatcaaacagtttggtattagaatcaaggatctccgaacgtatggagtcaattatacgtttttatataatttttggacaaatgtaaagtccatatctcctcttccatcaccaaaaaagttaatagcgttaactatcaaacaaactgctgaagtggtaggtcatactccatcaatttcaaaaagagcttacatggcaacgactattttagaaatggtaaaggataaaaattttttagatgtagtatctaaaactacgttcgatgaattcctatctatagtcgtagatcacgttaaatcatctacggatggatgatatagatctttacacaaataattacaagaccgataaatggaaatggataagcgtatgaaatctctcgcaatgaccgctttctttggggagctaagcacattagatattatggcattgataatgtctatatttaaacgccatccaaacaataccattttttcagtggataaggatggtcagtttatgattgatttcgaatacgataattataaggcttctcaatatttggatctgaccctcactccgatatttggagatgaatgcaagactcacgcatcgagtatagccgaacaattggcgtgtgcggatattattaaagaggatattagcgaatacatcaaaactactccccgtcttaaacgatttataaaaaaataccgcaatagatcagatactcgcatcagtcgagatacagaaaagcttaaaatagctctagctaaaggcatagattacgaatatataaaagacgcttgttaataagtaaatgaaaaaaaactagtcgtttataataaaacacaatatggatgccaacatagtatcatcttctactattgcaacgtatatagacgctttagcgaagaatgcttcagaattagaacagaggtctaccgcatacgaaataaataatgaattggaactagtatttattaagccgccattaattactttgacaaatgtagtgaatatctctacgattcaggaatcgtttattcgatttaccgttactaataaggaaggtgttaaaattagaactaagattccattatctaaggtacatggtctagatgtaaaaaatgtacagttagtagatgctatagataacatagtttgggaaaagaaatcattagtgacggaaaatcgtcttcacaaagaatgcttgttgagactatcgacagaggaacgtcatatatttttggattacaagaaatatggatcctctatccgactagaattagtcaatcttattcaagcaaaaacaaaaaactttacgatagactttaagctaaaatattttctaggatccggtgcccaatctaaaagttctttgttgcacgctattaatcatccaaagtcaaggcctaatacatctctggaaatagaattcacacctagagacaatgaaaaagttccatatgatgaactaataaaggaattgacgactctatcacgtcatatatttatggcttctccagagaatgtaattctttctccgcctattaacgcacctataaagacttttatgttgcctaaacaagatatagtaggtctggatctggaaaatctatatgccgtaactaagactgacggcattcctataactatcagagttacatcaaacgggttgtattgttattttacacatcttggttatattattagatatcctgttaagagaataatagattccgaagtagtagtctttggtgaggcagttaaggataagaactggaccgtatatctcattaagctaatagagcctgtgaatgcaatcaatgatagactagaagaaagtaagtatgttgaatctaaactagtggatatttgtgatcggatagtattcaagtcaaagaaatatgaaggtccgtttactacaactagtgaagtcgtcgatatgttatctacatatttaccaaagcaaccagaaggtgttattctgttctattcaaagggacctaaatctaacattgattttaaaattaaaaaggaaaatactatagaccaaactgcaaatgtagtatttaggtacatgtccagtgaaccaattatctttggagaatcgtctatctttgtagagtataagaaatttagcaacgataaaggctttcctaaagaatatggttctggtaagattgtgttatataacggcgttaattatctaaataatatctattgtttggaatatattaatacacataatgaagtgggtattaagtccgtggttgtacctattaagtttatagcagaattcttagttaatggagaaatacttaaacctagaattgataaaaccatgaaatatattaactcagaagattattatggaaatcaacataatatcatagttgaacatttaagagatcaaagcatcaaaataggagatatctttaacgaggataaactatcggatgtgggacatcaatacgccaataatgataaatttagattaaatccagaagttagttattttacgaataaacgaactagaggaccgttgggaattttatcaaactacgtcaagactcttcttatttctatgtattgttccaaaacatttttagacgattccaacaaacgaaaggtattggcgattgattttggaaacggtgctgacctggaaaaatacttttatggagagattgcgttattggtagcgacggatccggatgctgatgctatagctagaggaaatgaaagatacaacaaattaaactctggaattaaaaccaagtactacaaatttgactacattcaggaaactattcgatccgatacatttgtctctagtgtcagagaagtattctattttggaaagtttaatatcatcgactggcagtttgctatccattattcttttcatccgagacattatgctaccgtcatgaataacttatccgaactaactgcttctggaggcaaggtattaatcactaccatggacggagacaaattatcaaaattaacagataaaaagacttttataattcataagaatttacctagtagcgaaaactatatgtctgtagaaaaaatagctgatgatagaatagtggtatataatccatcaacaatgtctactccaatgactgaatacattatcaaaaagaacgatatagtcagagtgtttaacgaatacggatttgttcttgtagataacgttgatttcgctacaattatagaacgaagtaaaaagtttattaatggcgcatctacaatggaagatagaccgtctacaaaaaactttttcgaactaaatagaggagccattaaatgtgaaggtttagatgtcgaagacttacttagttactatgttgtttatgtcttttctaagcggtaaataataatatggtatgggttctgatatccccgttctaaatgcattaaataattccaatagagcgatttttgttcctataggaccttccaactgtggatactctgtattgttaatagatatattaatacttttgtcgggtaacagaggttctacgtcttctaaaaataaaagtttgataacatctggcctgttcataaataaaaacttggcgattctatatatactcttattatcaaatctagccattgtcttatagatgtgagctactgtaggtgtaccatttgattttctttctaatactatatatttctctcgaagaagttcttgcacatcatctgggaataaaatactactgttgagtaaatcagttattttttttatatcgatattgatggacatttttatagttaaggataataagtatcccaaagtagataacgacgataacgaagtatttatacttttaggaaatcacaatgactttatcagatcaaaattaacaaaattaaaggagcatgtatttttttctgaatatattgtgactccagataaatatggatctttatgcgtcgaattaaatgggtctagttttcagcacggcggtagatatatagaggtggaggaatttatagatgctggaagacaagttagatggtgttctacatccaatcatatatctgaagatatacccgaagatatacacactgataaatttgtcatttatgatatatacacttttgacgctttcaagaataaacgattggtattcgtacaggtacctccgtcgttaggagatgatagctatttgactaatccgttattgtctccgtattatcgtaattcagtagccagacaaatggtcaatgatatgatttttaatcaagattcatttttaaaatatttattagaacatctgattagaagccactatagagtttctaaacatataacaatagttagatacaaggataccgaagaattaaatctaacgagaatatgttataatagagataagtttaaggcgtttgtattcgcttggtttaacggcgtttcggaaaatgaaaaggtactagatacgtataaaaaggtatctaatttgatataatgaattcagtgactgtatcacacgcgccatatactattacttatcacgatgattgggaaccagtaatgagtcaattggtagagttttataacgaagtagccagttggctgctacgagacgagacgtcgcctattcctgataagttctttatacagttgaaacaaccgcttagaaataaacgagtatgtgtgtgcggtatagatccgtatccgaaagatggaactggtgtaccgttcgaatcaccaaattttacaaaaaaatcaattaaggagatagcttcatctatatctagattaaccggagtaattgattataaaggttataaccttaatataatagacggggttataccctggaattattacttaagttgtaaattaggagaaacaaaaagtcacgcgatctactgggataagatttccaagttactgctgcagcatataactaaacacgttagtgttctttattgtttgggtaaaacagatttctcgaatatacgggccaagttagaatccccggtaactaccatagtcggatatcatccagcggctagagaccgccaattcgagaaagatagatcatttgaaattatcaacgttttactggaattagacaacaaggcacctataaattgggctcaagggtttatttattaatgctttagtgaaattttaacttgtgttctaaatggatgcggctattagaggtaatgatgttatctttgttcttaagactataggtgtcccgtcagcgtgcagacaaaatgaagatccaagatttgtagaagcatttaaatgcgacgagttagaaagatatattgagaataatccagaatgtacactattcgaaagtcttagggatgaggaagcatactctatagtcagaattttcatggatgtagatttagacgcgtgtctagacgaaatagattatttaacggctattcaagattttattatcgaggtgtcaaactgtgtagctagattcgcgtttacagaatgcggcgccattcatgaaaatgtaataaaatccatgagatctaatttttcattgactaagtctacaaatagagataaaacaagttttcatattatctttttagacacgtataccactatggatacattgatagctatgaaacgaacactattagaattaagtagatcatctgaaaatccactaacaagatcgatagacactgccgtatataggagaaaaacaactcttcgggttgtaggtactaggaaaaatccaaattgcgacactattcatgtaatgcaaccaccgcatgataatatagaagattacctattcacttacgtggatatgaacaacaatagttattacttttctctacaacaacgattggaggatttagttcctgataagttatgggaaccagggtttatttcattcgaagacgctataaaaagagtttcaaaaatattcattaattctataataaactttaatgatctcgatgaaaataattttacaacggtaccactggtcatagattacgtaacaccttgtgcattatgtaaaaaacgatcgcataaacatccgcatcaactatcgttggaaaatggtgctattagaatttacaaaactggtaatccacatagttgtaaagttaaaattgttccgttagatggtaataaactgtttaatattgcacaaagaattttagacactaactctgttttattaaccgaacgaggagaccatatagtttggattaataattcatggaaatttaacagcgaagaacccttgataacaaaactaattttgtcaataagacatcaactacctaaggaatattcaagcgaattactctgtccaagaaaacgaaagactgtagaagctaacatacgagacatgttagtagattcagtagagaccgatacctatccggataaacttccgtttaaaaatggtgtattggacctggtagacggaatgttttactctggagatgatgctaaaaaatatacgtgtactgtatcaaccggatttaaatttgacgatacaaagttcgtcgaagacagtccagaaatggaagagttaatgaatatcattaacgatatccaaccattaacggatgaaaataagaaaaatagagagctatatgaaaaaacattatctagttgtttatgtggtgctaccaaaggatgtttaacattcttttttggagaaactgcaactggaaagtcgacaaccaaacgtttgttaaagtctgctatcggtgacctgtttgttgagacgggtcaaacaattttaacagatgtattggataaaggacctaatccatttatcgctaacatgcatttgaaaagatctgtattctgtagcgaactacctgattttgcctgtagtggatcaaagaaaattagatctgacaatattaaaaagttgacagaaccttgtgtcattggaagaccgtgtttctccaataaaattaataatagaaaccatgcgacaatcattatcgatactaattacaaacctgtttttgataggatagataacgcattaatgagaagaattgccgtcgtgcgattcagaacacacttttctcaaccttctggtagagaggctgctgaaaataatgacgcgtacgataaagtcaaactattagacgaggggttagatggtaaaatacaaaataatagatatagattcgcatttctatacttgttggtgaaatggtacagaaaatatcatgttcctattatgaaactatatcctacaccggaagagattccggactttgcattctatctcaaaataggtactctgttagtatctagctctgtaaagcatattccattaatgacggacctctccaaaaagggatatatattgtacgataatgtggtcactcttccgttgactactttccaacagaaaatatccaagtattttaattctagactatttggacacgatatagagagcttcatcaatagacataagaaatttgccaatgttagtgatgaatatctgcaatatatattcatagaggatatttcatctccgtaaatatatgctcatatatttatagaagatatcacatatctaaatgaataccggaatcatagatttatttgataatcatgttgatagtataccaactatattacctcatcagttagctactctagattatctagttagaactatcatagatgagaacagaagcgtgttattgttccatattatgggatcaggtaaaacaataatcgctttgttgttcgccttggtagcttccagatttaaaaaggtttacattctagtgcctaatatcaacattttgaaaatttttaattataatatgggtgtagctatgaacttgtttaatgacgaattcatagctgagaatatctttattcattccacaacaagtttttattctcttaattataacgataacgtcattaattataacggattatctcgctacaataactctatttttatcgttgatgaggcacataatatctttgggaataatactggagaacttatgaccgtgataaaaaataaaaacaagattccttttctactattgtctggatctcccattactaacacacctaatactctgggtcatattatagatttaatgtccgaagagacgatagattttggtgagattattagtcgtggtaagaaagtaattcagacacttcttaacgaacgcggtgtgaatgtacttaaggatttgcttaaaggaagaatatcatattacgaaatgcctgataaagatctaccaacgataagatatcacggacgtaagtttctagatactagagtagtatattgtcacatgtctaaacttcaagagagagattatatgattactagacgacagctatgttatcatgaaatgtttgataaaaatatgtataacgtgtcaatggcagtattgggacaacttaatctgatgaataatttagatactttatttcaggaacaggataaggaattgtacccaaatctgaaaataaataatggcgtgttatacggagaagaattggtaacgttaaacattagttccaaatttaaatactttattaatcggatacagacactcaacggaaaacattttatatacttttctaattctacatatggtggattggtaattaaatatatcatgctcagtaatggatattctgaatataatggttctcagggaactaatccacatatgataaacggcaaaccaaaaacatttgctatcgttactagtaaaatgaaatcgtctttagaggatctattagatgtgtataattctcctgaaaacgatgatggcagtcaattgatgtttttgttttcatcaaacattatgtccgaatcctatactctaaaagaggtaaggcatatttggtttatgactatcccagatactttttctcaatacaaccaaattcttggacgatctattagaaaattctcttacgccgatatttctgaaccagttaatgtatatcttttagccgccgtatattccgatttcaatgacgaagtaacgtcattaaacgattacacacaggatgaattgattaatgttttaccatttgacatcaaaaagctgttgtatctaaaatttaagacgaaagaaacgaatagaatatactctattcttcaagagatgtctgaaacgtattctcttccaccacatccatcaattgtaaaagttttattgggagaattggtcagacaatttttttataataattctcgtattaagtataacgactccaagttacttaaaatggttacatcagttataaaaaataaagaagacgctaggaattacatagatgatattgtaaacggtcacttctttgtatcgaataaagtatttgataaatctcttttatacaaatacgaaaacgatattattacagtaccgtttagactttcctacgaaccatttgtttggggagttaactttcgtaaagaatataacgtggtatcttctccataaaactgatgaaatatataaagaaataaatgtcgagctttgttaccaatggataccttccagttacattggaaccacacgagctgacgttagacataaaaactaatattaggaatgccgtatataagacgtatctccatagagaaattagtggtaaaatggccaagaaaatagaaattcgtgaagacgtggaattacctctcggcgaaatagttaataattctgtagttataaacgttccgtgtgtaataacctacgcgtattatcacgttggggatatagtcagaggaacattaaacatcgaagatgaatcaaatgtaactattcaatgtggagatttaatctgtaaactaagtagagattcgggtactgtatcatttagcgattcaaagtactgcttttttcgaaatggtaatgcgtatgacaatggcagcgaagtcactgccgttctaatggaggctcaacaaggtatcgaatctagttttgtttttctcgcgaatatcgtcgactcataaaaaagagaatagcggtaagtataaacacgaatactatggcaataattgcgaatgttttattctcttcgatatatttttgataatatgaaaaacatgtctctctcaaatcggacaaccatctcataaaatagttctcgcgcgctggagaggtagttgctgctcgtataatctccccagaataatatacttgcgtgtcgtcgttcaatttatacggatttctatagttctctgttatataatgcggttttccatcatgattagacgacgacaatagtgttctgaatttagatagttgatcagaatgaatgtttattggcgttggaaaaattatccatacagcgtctgcagagtggttgatagttgttcctagatatgtaaaataatccaacttactaggcagcaaattgtctagataaaatactgaatcaaacggtgcagacgtattggcggatctaatggaatccaattgattaactatcttttgaaaatatacatttttatgatccaatacttgtaagaatatagaaataatgataagtccatcatcgtgtttttttgcctcttcataagaactatatttttttttattccaatgaacaagattaatctctccagagtatttgtacacatctatcaagtgattggatccataatcgtcttcctttccccaatatatatgtagtgatgataacacatattcattggggagaaaccctccacttatatatcctcctttaaaattaatccttactagttttccagtgttctggatagtggttggtttcgactcattataatgtatgtctaacggcttcaatcgcgcgttagaaattgcttttttagtttctatattaataggagatagttgttgcggcatagtaaaaatgaaatgataactgtttaaaaatagctcttagtatgggaattacaatggatgaggaagtgatatttgaaactcctagagaattaatatctattaaacgaataaaagatattccaagatcaaaagacacgcatgtgtttgctgcgtgtataacaagtgacggatatccgttaataggagctagaagaacttcattcgcgttccaggcgatattatctcaacaaaattcagattctatctttagagtatccactaaactattacggtttatgtactacaatgaactaagagaaatctttagacggttgagaaaaggttctatcaacaatatcgatcctcactttgaagagttaatattattgggtggtaaactagataaaaaggaatctattaaagattgtttaagaagagaattaaaagaggaaagtgatgaacgtataacagtaaaagaatttggaaatgtaattctaaaacttacaacacgggataaattatttaataaagtatatataagttattgcatggcgtgttttattaatcaatcgttggaggatttatcgcatactagtatttacaatgtagaaattagaaagattaaatcattaaatgattgtattaacgacgataaatacgaatatctgtcttatatttataatatgctagttaatagtaaatgaacttttacagatctagtataattagtcagattattaagtataatagacgactagctaagtctattatttgcgaggatgactctcaaattattacactcacggcattcgttaaccaatgcctatggtgtcataaacgagtatccgtgtccgctattttattaactactgataacaaaatattagtatgtaacagacgagatagttttctctattctgaaataattagaactagaaacatgtctagaaagaaacgattatttctgaattattccaattatttgtccaaacaggaaagaagtatactatcgtcatttttttctctagatccagctactactgataatgatagaatagatgctatttatccgggtggcatacccaaaaggggtgagaatgttccagagtgtttatccagggaaattaaagaagaagttaatatagacaattcttttgtattcatagacactcggttttttattcatggcatcatagaagataccattattaataaattttttgaggtaatcttctttgtcggaagaatatctttaacgagtgatcaaatcattgatacatttaaaagtaatcatgaaatcaaggatctaatatttttagatccgaattcaggtaatggactccaatacgaaattgcaaaatatgctctagatactgcaaaactcaaatgttatggccatagaggatgttattacgaatcattaaaaaaattaactgaggatgattgattagaaaatataaattaatttaccatcgtgtatttttataacgggattgtccggcatatcatgtagatagttaccgtctacatcgtatactcgaccatctacgcctttaaatcctctatttattgacattaatctattagaattggaataccaaatattagtaccctcaattagtttattggtaatattttttttagacgatagatcgatggctcttgaaaccaaggttttccaaccggactcattgtcgatcggtgagaagtctttttcattagcatgaatccattctaatgatgtatgtttaaacactctaaacaattggacaaattcttttgatttgctttgaatgatttcaaataggtcttcgtctacagtaggcataccattagataatctagccattataaagtgcacgtttacatatctacgttctggaggagtaagaacgtgactattgagacgaatggctcttcctactatctgacgaagagacgcctcgttccatgtcatatctaaaatgaagatatcattaattgagaaaaaactaataccctcgcctccactagaagagaatacgcatgttttaatgcattctccgttagtgtttgattcttggttaaactcagccaccgccttgattctagtatcttttgttctagatgagaactctatattagagataccaaagactttgaaatatagtaataagatttctattcctgactgattaacaaatggttcaaagactagacatttaccatgggatgctaatattcccaaacatacatctataaatttgacgcttttctcttttaattcagtaaatagagagatatcagccgcactagcatcccctttcaatagttctccctttttaaaggtatctaatgcggatttagaaaactctctatctcttaatgaatttttaaaatcattatatagtgttgctatctcttgcgcgtattcgcccggatcacgattttgtctttcaggaaagctatcgaacgtaaacgtagtagccatacgtctcagaattctaaatgatgatatacctgtttttatttcagcgagtttagccttttgataaatttcttcttgctttttcgacatattaacgtatcgcattaatactgttttcttagcgaatgatgcagacccttctacgtcatcaaaaatagaaaactcgttattaactatgtacgaacataggcctcctagtttggagactaattctttctcatcaactagacgtttattctcaaatagcgattggtgttgtaaggatcctggtcgtagtaagttaaccaacatggtgaattcttgcacactattaacgataggtgtagccgataaacaaatcatcttatggttttttaatgcgatggtcttagataaaaaattatatactgaacgagtaggacggatcttaccatcttctttgattaatgatttagaaatgaagttatgacattcatcaataatgacgcatattctactcttggaattaatagttttgatattagtaaaaaatttatttctaaaattttgatcatcgtaattaataaaaatacaatccttcgttatctctggagcgtatctgagtatagtgttcatccaaggatcttctatcaaagcctttttcaccaataagataatagcccaattcgtataaatatccttaagatgtttgagaatatatacagtagtcattgttttaccgacacccgtttcatggaacaataaaagagaatgcatactgtctaatcctaagaaaactcttgctacaaaatgttgataatccttgaggcgtactacgtccgaccccatcatttcaacgggcatattagtagttctgcgcaatgcataatcgatataggccgcgtgtgatttactcatttatgagtgataagtaataactatgttttaaaaatcacagcagtagtttaactagtcttctctgatgtttgttttcgatactttttgaatcagaagtcatactagaataaagcaacgagtgaacgtaatagagagcttcgtatactctattcgaaaactctaagaacttattaatgaattccgtatccactggattgtttaaaatactaaattgaacactgttcacatccttccaagaagaagacttagtgacggacttaacatgagacataaataaatccaaattttttttacaaacatcactagccaccataatggcgctatctttcaaccagctatcgcttacgcattttagcagtctaacatttttaaagagactacaatatattctcatagtatcgattacacctctaccgaataaagttggaagtttaataatacaatatttttcgtttacaaaatcaaataatggtcgaaacacgtcgaaggttaacatcttataatcgctaatgtatagattgttttcagtgagatgattattagatttaatagcatctcgttcacgtttgaacagtttattgcgtgcgctgaggtcggcaactacggcgtccgctttagtactcctcccataatactttacgctattaatctttaaaatttcatagactttatctagatcgctttctggtaacatgatatcatgtgtaaaaagttttaacatgtcggtcggcattctatttagatcattaactctagaaatctgaagaaagtaattagctccgtattccagactaggtaatgggcttttacctagagacagattaagttctggcaatgtttcataaaatggaagaaggacatgcgttccctcccggatattttttacaatttcatccatttacaactctatagtttgttttcattattattagttattatctcccataatcttggtaatacttaccccttgatcgtaagataccttatacaggtcattacatacaactaccaattgtttttgtacataatagattggatggttgacatccatggtggaataaactactcgaacagatagtttatctttccccctagatacattagccgtaatagttgtcggcctaaagaatatctttggtgtaaagttaaaagttagggttcttgttccattattgctttttgtcagtagttcattataaattctcgagatgggtccgttctctgaatatagaacatcatttccaaatctaacttctagtctagaaataatatcggtcttattcttaaaatctattcccttgatgaagggatcgttaatgaacaaatccttggcctttgattcggctgatctattatctccgttatagacgttacgttgactagtccaaagacttacaggaatagatgtatcgatgatgttgatactatgtgatatgtgagcaaagattgttctcttagtggcatcactatatgttccagtaatggcggaaaactttttagaaatgttatatataaaagaattttttcgtgttccaaacattagcagattagtatgaagataaacactcatattatcaggaacattatcaatttttacatacacatcagcatcttgaatagaaacgataccatcttctggaacctcaacaatctcggcagactccggataaccagtcggtgggccatcactaacaataactagatcatccaacaatctactcacatatgcatctatataatctttttcatcttgtgagtaccctggatacgaaataaatttattatccgtatttccataataaggtttagtataaacagagagcgatgttgccgcatgaacttcagttacagtcgccgttggttggtttatttgacctattactctcctaggtttctctataaacgatggtttaatttgtacattcttaaccatatatccaataaagctcaattcaggaacataaacaaattctttgttgaacgtttcaaagtcgaacgaagagtcacgaataacgatatcggatactggattgaaggttaccgttacggtaatttttgaatcggatagtttaagactgctgaatgtatcttccacatcaaacggagttttaatataaacgtatactgtagatggttctttaatagtgtcattaggagttaggccaatagaaatatcattaagttcactagaatatccagagtgtttcaaagcaattgtattattgatacaattattatataattcttcgccctcaatttcccaaataacaccgttacacgaagagatagatacgtgattaatacatttatatccaacatatggtacgtaaccgaatcttcccatacctttaacttctggaagttccaaactcagaaccaaatgattaagcgcagtaatatactgatccctaatttcgaagctagcgatagcctgattgtctggaccatcgtttgtcataactccggatagagaaatatattgcggcatatataaagttggaatttgactatcgactgcgaagacattagaccgtttaatagagtcatccccaccgatcaaagaattaatgatagtattattcattttctatttaaaatggaaaaagcttacaataaactccgtagagaaatatctataatttgtgagttttccttaaagtaacagcttccgtaaacgccgtctttatctcttagtaagtttattgtatttataaccttttccttatcttcatagaatactaaaggcaacaaagaaatttttggttcttctctaagagctacgtgagacttaaccatagacgccaacgaatccctacatattttagaacagaaatacccaacttcaccacccttgaatgtctcaatactaataggtttaaaaaccaaatcttgattacaaaaccaacacttatcaattacactatttgtcttaatagacacatctgccatagatttataatactttggtagtatacaagcgagtgcttcttctttagcgggcttaaagactgctttaggtgctgaaataaccacatctggaaggcttactcgcttagccatttaattacggaactatttttttatacttctaatgagcaagtagaaaacctctcatctacaaaaacatactcgtgtccataatcctctaccatagttacacgttttttagatctcatatgtgctaaaaagttttcccatactaattggttactattatttttcgtataatttttaacagtttgaggttttagatttttagttacagaagtgatatcgaatattttatccaaaaagaatgaataattaattgtcttagaaggagtgttttcttggcaaaagaataccaagtgcttaaatatttctactacttcattaatcttttctgtactcagattcagtttctcatcttttacttgattgattatttcaaagactaacttataatcctttttatttattctctcgttagccttaagaaaactagatacaaaatttgcatctacatcatccgtggatatttgatttttttccatgatatccaagagttccgagataatttctccagaacattgatgagacaataatctccgcaatacatttctcaaatgaataagtttattagacacatggaagtttgactttttttgtacctttgtacatttttgaaataccgactcgcaaaaaatacaatattcatatccttgttcagatactataccgttgtgtctacaaccgctacataatcgtagattcatgttaacactctacgtatctcgtcgtccaatattttatataaaaacattttatttctagacgttgccagaaaatcctgtaatatttttagttttttgggctgtgaataaagtatcgccctaatattgttaccgtcttccgccaatatagtagttaaattatccgcacatgcaaaagaacaccgcttaggcggattcagtacaatgttatatttttcgtaccaactcatttaaatatcataatctaaaatagttctgtaatatgtctagcgctaatatattgatcataatcctgtgcataaattaagatacaacaatgtctcgaaatcatcgacatggcttcttccatagttagaagatcgtcgtcaaagttagcaacgtgattcatcaacatttgctgttttgaggcagcaaatactgaaccgtcgccattcaaccattcataaaaaccatcgtctgaatccattgataatttcttgtactggtttttgagagctcgcatcaatctagcatttctagctcccggattgaaaacagaaagaggatcgtacatccagggtccattttctgtaaatagaatcgtataatgtcccttcaagaagatatcagacgatccacaatcaaagaattggtctccgagtttgtaacaaactgcggactttaacctatacatgataccgtttagcatgatttctggtgatacgtcaatcggagtatcatctattagagatctaaagccggtgtaacattctccaccaaacatattcttattctgacgtcgttctacataaaacatcattgctccattaacgataacaggggaatgaacagcactacccatcacattagttcccaatggatcaatgtgtgtaactccagaacatcttccatatcctatgttaggaggagcgaacaccactcttccactattgccatcgaatgccatagaataaatatccttggaattgatagaaatcggactgtcggatgttgtgatcatcttcataggattaacaactatgtatggtgccgcctgaagtttcatatcgtaactgatgccgtttataggtctagccacagaaaccaacgtaggtctaaatccaactatagacaaaatagaagccaatatctgttcctcatctgtcataacttgagagcatccagtatgaataatcttcattagatggggatctaccgcatcatcatcgttacaataaaaaattcccattctaatgttcataattgcttttctaatcatggtatgcatgtttgctctctgaatctctgtggaaattagatctgatacacctgtaatcactatcggattatcctccgtaagacgattaaccaacaacatataattataagactttacttttctaaattcataaagttgctggattaggctataggtgtctccatgtacatacgcgttctcgagcgcaggaagtttaataccgaatagtgccatcagaataggatgaatatagtaattagtttctggttttctataaataaaagacaaatcttgtgaactagacatatcggtaaaatgcatggattggaatcgtgtagtcgacagaagaatatgatgattagatggagagtatattttatctaactctttgagttggtcaccgattctaggactagctcgagaatgaataagtactaaaggatgagtacatttcacagaaacactagcattgttcaatgtgctctttacatgggtaaggagttgaaatagctcgtttctatttgttctgacaatatttagtttattcataatgttaagcatatcctgaatagtaaagttagatgtgtcatacttgttagtagttagatatttagcaattgcattcccatcatttctcaatctcgtactccaatcatgtgtagatgctacttcgtcgatggaaaccatacaatcctttttgataggctgttgagattgattatttcctgcacgtttaggtttggtacgttgatttctagcccctgcagatataaagtcatcgtctacaattttggataatgaattgcatacactacaagacaaagatttatcagaagtgtgaatatgatcttcatctaccaaagaaagagtttgattagtataactagattttagtcctgcgttagatgttaaaaaaacatcgctattgaccacggcttccattatttatattcgtagtttttactcgaaagcgtgattttaatatccaatcttattacttttggaatcgttcaaaacctttgactagttgtagaatttgatctattgccctacgcgtatactcccttgcatcatatacgttcgtcaccagatcgtttgtttcggcctgaagttggtgcatatctttttcaacactcgacatgagatccttaagggccatatcgtctagattttgttgagatgctgctcctggatttggattttgttgtgctgttgtacatactgtaccaccagtaggtgtaggagtacatacagtggccacaataggaggttgaggaggtgtaaccgttggagtagtacaagaaatacttccatccgattgttgtgtacatgtagttgttggtaacgtctgagaaggttgggtagatggcggtgtcgtcgtcttttgatctttattaaatttagagataatatcctgaacagcattgctcggcgtcaacgctggaaggagtgaactcgccggcgcatcagtatctgcagacagccaatcaaaaagattagacatatcagatgatgtattagtttgttgtcgtggttttggtgtaggagcagtactactaggtagaagaataggagccgatgtaggtgtcggaaccggaaccggctgtggagttatatgaatagttggttgtagcggttggataggctgtctgctggcggccatcatattatctctagctagttgttctcgcaactgtctttgataatacgactcttgagactttagtcctatttcaatcgcttcatcctttttcgtatccggatcctttttttcagaataatagattgacgactttggtgtagaggattctgccagcccctgtgagaacttgttaaagaagtccatttaaggctttaaaattgaattgcgattataagattaaatggcagacacagacgatattatcgactatgaatccgatgatctcactgaatacgaggatgatgaagaagaggaagaagatggagagtcactagaaactagtgatatagatcccaaatcttcttataagattgtagaatcagcatccactcatatagaagatgcgcattccaatcttaaacatatagggaatcatatatctgctcttaaacgacgctatactagacgtataagtctatttgaaatagcgggtataatagcagaaagctataacttgcttcaacgaggaagattacctctagtttcagaattttctgacgaaacgatgaagcaaaatatgctacatgtaattatacaagagatagaggagggttcttgtcctatagtcatcgaaaagaacggagaattgttgtcggtaaacgattttgacaaagatggtctaaaattccatctagactatattatcaaaatttggaaacttcaaaaacgatattagaatttatacgaatatcgttctctaaatgtcacaatcaagtctcgcatgttcagcaatttattgtcgtactttatatcgtgttcattaacgatatcttgcaaaatagtaatgattctatcttccttcgatagatattcttcagagattattgtcttatattctttcttgttatccgatatgaatttgataagactttgaacattattaatacccgtctgtttaattttttctacagatattttagttttggcagattctatcgtatctgtcaatagacatccaacatcgacattcgacgtcaattgtctataaatcaacgtataaattttagaaataacattagcgaattgttgtgcattgatgtcgttattctgaaacagtatgattttaggtagcattttcttaacaaagagaacgtatttattgttactcagttgaacagatgatatatccagattactaacgcatctgattccgtataccaaactttcagaagaaatggtgtacaattgtttgtattcattcaatgtctccttttcagaaattagtttagagtcgaatactgcaataattttcaagagatagttttcatcagataagattttatttagtgtagatatgataaaactattgttttgttggagaacttgatacgccgcgttctctgtagtcgacgctctcaaatgggaaacgatctccattatttttttggaatcggatactatatcttcggtatcttgacgcagtctagtatacatagagttaagagagattagagtttgtacattaagcaacatgtctctaaatgtggctacaaacttttcctttttcacatcatctagtttattatataccgatttcacaacggcaccagatttaaggaaccagaatgaaaaactctgataactacaatatttcatcatagttacgattttatcatcttctatagttggtgtaatagcgcatacctttttctccaagactggaaccaacgtcataaaaatgtttaaatcaaaatccatatcaacatctgatgcgctaagaccagtctcgcgttcaagattatctttactaatggtgacgaactcatcgtatagaactctaagtttgtccattatttatttacagatttagttgtttaatttatttgtgctcttccagagttgggatagtatttttctaacgtcggtattatattattaggatctacgttcatatgtatcataatattaatcatccacgttttgataaatctatctttagcttctgaaataacgtatttaaacaaaggagaaaaatatttagctacggcatcagacgcaataacattttttgtaaatgtaacgtatttagacgacagatcttcgttaaaaagttttccatctatgtagaatccatcggttgttaacaccattcccgcgtcagattgaataggagtttgaatagtttgttttggaaatagatccttcaataacttatagttgggtgggaaaaaatcgattttatcactagactctttcttttttactatcattacctcatgaactatttcttgaatgagtatatgtattttctttcctatatcggacgcgttcattggaaaatataccatgtcgttaactataagaatatttttatcctcgtttacaaactgaataatatcagatgtagttcgtaaacgaactatatcatcaccagcacaacatctaactatatgatatccactagtttcctttagccgtttattatcttgttccatattagcagtcattccatcatttaagaaggcgtcaaaaataatagggagaaatgacattttggattctgttacgactttaccaaaattaaggatatacggacttactatctttttctcaacgtcaatttgatgaacacacgatgaaaatgtgcttctatgagattgatcatgtagaaaacaacaagggatacaatatttccgcatatcatgaaatatattaagaaatcccaccttattatatttccccaaaggatccatgcacgtaaacattatgccgttatcattaataaagacttctttctcatcggatctgtaaaagttgttactgatttttttcattccaggatctagataattaataatgatgggttttctattcttattctttgtattttggcatatcctagaccagtaaacagtttccactttggtaaaatcagcagacttttgaacgctattaaacatggcattaatggcaataactaaaaatgtaaaatatttttctatgttaggaatatggtttttcactttaatagatatatggtttttggccaaaatgatagatatttttttatccgaggatagtaaaatattattagtcgccgtctctataaaaatgaagctagtctcgatatccaattttattctagaattgataggagtcgccaaatgtaccttatacgttatatctcccttgatgcgttccatttgtgtatctatatcggacacaagatctgtaaatagttttacgttattaatcatcacggtatcgccgtcgctagataacgctaatgtaccatccaagtcccaaatggagagatttaactgttcatcgtttagaataaaatgattaccggtcatattaataaagtgttcatcgtatctagataacaacgacttataattaatgtccaagtcttgaactcgctgaatgatcttttttaacccagttagttttagattggtacgaaatatattgttaaactttgattctatagtaatgtccaaatctagttgtggaaatacttccatcaacattgtttcaaacttgataatattattatctacatcttcgtacgatccaaattccggaatagatgtatcgcacgctctggccacccagataaccaaaaagtcacacgctccaggatatacattgtataaaaagctatcgttttttagtagggtttttttctgcgtgtatacgaagggattaaaaatagtattatcaacgtaactatattccaaattattcttatgagaatagataataatatcgtccttaatatctaacaaatttcctaaatatccctttaattgagtcattcgaagcgtcaatagaatatgtctcttaactatttccggctgttgtatatttaaatgacttcgtaaaaaataatatatgggcgacttctcatctatgtaatcatatggagtgagatatagggctcgttctacctcctgccccttacccacctgtaataccaattgcggacttactatatatcgcatatttatatcgtggggtaaagtgaaaatctactaccgatgatgtaagtcttacaatgttcgaaccagtaccagatcttaatttggaggcctccgtagaactaggggaggtaaatatagatcaaacaacacctatgataaaggagaatagcggttttatatcccgcagtagacgtctattcgcccatagatctaaggatgatgagagaaaactagcactacgattctttttacaaagactttattttttagatcatagagagattcattatttgttcagatgcgttgacgctgtaaaagacgtcactattaccaaaaaaaataacattatcgtggcgccttatatagcacttttaactatcgcatcaaaaggatgcaaacttacagaaacaatgattgaagcattctttccagaactatataatgaacatagtaagaaatttaaattcaactctcaagtatccatcatccaagaaaaactcggataccagtttggaaactatcacgtttatgattttgaaccgtattactctacagtagctctggctattcgagatgaacattcatctggcatttttaatatccgtcaagagagttatctggtaagttcattatctgaaataacatatagattttatctaattaatctaaaatctgatcttgttcaatggagtgctagtacgggcgctgtaattaatcaaatggtaaatactgtattgattacagtgtatgaaaagttacaactggtcatagaaaatgattcacaatttacatgttcattggctgtggaatcaaaacttccaataaaattacttaaagatagaaatgaattatttacaaaattcattaacgagttaaaaaagaccagttcattcaagataagcaaacgcgataaggatacgctactaaaatattttacttaggactggagttagaatttatagacgactcatttcgtttatcattattactaccatcattattagtattcttcttgttatcttgttcagaaatatacagcaatgctatgcctaatactaaatacattatcatgcttgcaatggctctaacaacgacgaaccaaaatgaatttggtcgtagcttttgttcacaaaaatacataaagaaatgtctacataaatctatggcgccattggctacttgaaatagcgccagtcctcctacagattttaatatagctgtataacatgacatttattcatcatcaaaagagacagagtcaccatctgtcatatttagattttttttcatgtgttcaaagtatcctctactcatttcattataatagtttatcatacttagaattttaggacggatcaatgagtaagacttgactagatcgtcagtagtaatttgtgcatcgtctattctgcatccgcttcgtcgaataatgtatagcatcgctttgagattctccatagctatcaagtctttatacaatgacatggaaatatctgtgaatactttatacttctccaacatcgatgccttaacatcatcgcctactttagcattgaaaatacgttctattgtgtagatggatgtaacaagatttttaaacaacaatgccatcttacacgatgattgcctcaagtctccaatcgtttgtttagaacgattagctacagagtccaatgcttggctgactagcatattattatctttagaaattgtattcttcaatgaggcgtttatcatatctgtgatttcgttagtcatattacagtctgactgggttgtaatgttatccaacatatcacctatggatacggtacacgtaccagcatttgtaataatcctatctaagatgttgtatggcattgcgcagaaaatatcttctcctgtaatatctccactctcgataaatctactcagattattcttaaatgccttattctctggagaaaagatatcagtgtccatcatttcattaatagtatacgcagaaaagataccacgagtatcaattctatccaagatacttatcggttccgagtcacagataatggtttcctctccttcgggagatcctgcatagaaatatctaggacaatagtttctatactgtctgtaactctgataatctctaaagtcactaactgataccatgaaattgagaagatcaaacgctgaagtaattaatttttctgcctcgtttttactacaactagttttcatcaatgtagtgacgatgtattgtttagttacttttggtctaatactgatgatagagatattattgcttcccataatggatcttctagtagtcaccttaaagcccattgatgcgaatagcagatagataaagtcttggtatgactcctttctaatatagtacggactacctttgtcacccaactttatacccacataagccataacaacctctttaatagccgtttcatgaggtttatcagccatgagcctgagtagttggaagaatctcatgaatcccgtctcagaaagtcctatatgcatgatagatttatctttcctgggaaactctcgtatagtcatagatgaaatactcttcaaagtttctgaaataagattagtaacagtcttacctccgactactctgggtaacaaacaaactctaataggtgttttctctgcggagataatatcagaaaggatagagcaataagtagtattattgtgattataaagaccgaatacataacaggtagaatttataaacatcatgtcctgaaggtttttagacttgtattcctcgtaatccataccgtcccaaaacatggatttggtaactttgatagccgtagatctttgttccttcgccaacaggttaaagaaattaataaagaatttgttgtttctatttatgtccacaaattgcacgtttggaagcgccacggttacattcactgcagcattttgaggatcgcgagtatgaagtacgatgttattgtttactggtatatctggaaagaaatctaccagtctaggaataagagattgatatcgcatagaaatagtaaagtttataatctcatcatcgaagagcattttgttaccattgtaataaatatccactctgtcatatgtataaatgaagtactgttcaaacatgatgagatgtttatatgttggcatagtagtgagatcgacgtttggtaatggcaatgtattaagattaactccataatgtctagcagcatctgcgatgttataagcgtcgtcaaagcggggtcgatcttgtattgttatatattgtctaacacctataagattatcaaaatcttgtctgcttaatacaccgttaacaatttttgccttgaattcttttattggtgcattaataacatccttatagaggatgttaaacaaataagtgttatcaaagttaagatctggatatttcttttctgctagaacatccattgagtcggagccatctggtttaatataaccaccgataaatctagctctgtattctgtatccgtcaatctaatattaagaaggtgttgagtgaaaggtggaagatcgtaaaagctgtgagtattaatgataggattagtttccgaactaatgttaattggggtattaataatatctatatttccagcgttaagtgtaacattaaacagttttaattcacgtgaagtagtatcaattaaataattaatgcccaatttggatatagcagcctgaagctcatcttgtttagttacggatcctaatgagttattaagcaatatatcgaacggatgaacgaaggttgttttgagtttgtcgcatactttgtaatctagacatagatgcggaagaacggtagaaactatacgaaataaatattcagagtcctctaattgatcaagagtaactattgacttaataggcatcatttatttagtattaaatgacgaccgtaccagtgacggatatacaaaacgatttaattacagagttttcagaagataattatccatctaacaaaaattatgaaataactcttcgtcaaatgtctattctaactcacgttaacaacgtggtagatagagaacataatgccgccgtagtgtcatctccagaggaaatatcctcacaacttaatgaagatctatttccagatgatgattcaccggccactattatcgaacgagtacaacctcatactactattattgacgatactccacctcctacgtttcgtagagagttattaatatcggaacaacgtcaacaacgagaaaaaagatttaatattacagtatcgaaaaatgctgaagcaataatggaatctagatctatgataacttctatgccaacacaaacaccatccttgggagtagtttatgataaagataaaagaattcagatgttagaggatgaagtggttaatcttagaaatcaacgatctaatacaaaatcatctgataatttagataattttaccaaaatactatttggtaagactccgtataaatcaacagaagttaataagcgtatagccatcgttaattatgcaaatttgaacgggtctcccttatcagtcgaggacttggatgtttgttcagaggatgaaatagatagaatctataaaacgattaaacaatatcacgaaagtagaaaacgaaaaattatcgtcactaacgtgattattattgtcataaatattatcgagcaagcattgctaaaactcggatttgaagaaatcaaaggactgagtaccgatatcacttcagaaattatcgatgtggagatcggagatgactgcgatgctgtagcatcaaaactaggaatcggtaacagtccggttcttaatattgtattgtttatactcaagatattcgttaaacgaattaaaattatttaatttaatacattcccatatccagacaacaatcgtctggattaatctgttcctgtcgtctcataccggacgacatattaatctttttattagtgggcatctttttagatggtttctttttcccagcattaactgagtcgatacctagaagatcgtgattgatctctccgaccattccacgaacttctaattggccgtctctgacggtaccataaactattttaccagcattagtaacagcttggacaatctgaccatccatcgcattgtacgatgtagtagtaactgttgttctacgtttaggagcaccagaagtatttttggagcccttggaggctgatgtagaagaagacgaggattttgattttggtttacatgtaatacattttgaactctttgattttgtatcacatgcgccggcagtcacatctgtttgagaattaagattattgttgcctcctttgacggctgcatctccaccgatttgcgctagtagatttttaagctgtggtgtaatcttattaactgtttcgatataatcatcgtaactgcttctaacggctaaattttttttatccgccatttagaagctaaaaatatttttatttatgcagaagatttaactagattatacaatgaactaatatgatccttttccagattatttacaaacttggtattttttggttctggaggaggcgaatttaaattcggacttggattcagattttgtaagttcttgatcttattatacatcgagtataggatggcgacagtaactgctacacaaataccgatcaaaagaagaataccaatcatttattgacaataacttcactattgatcaagtatgcaatatatcatcttttcactaaataagtagtaataatgattcaacaatgtcgagatatatggacgataataatttagttcatggaaatatcgctatgattggtgtgaatgactccgctaactctgtggggtgcgcagtgctttccccacatagaataaattagcattccgactgtgataataataccaagtataaacgccataatactcaatactttccatgtacgagtgggactggtagacttactaaagtcaataaaggcgaagatacacgaaagaatcaaaagaatgattccagcgattagcacgccggaaaaataatttccaatcataagcatcatgtccatttaactaataaaaattttaaatcgccgaatgaacaaagtggaatataaaccatataaaaacaatagtttgtactgcaaaaataatatctatttttgttttcgaagatatggtaaaattaaatagtagtacacagcatgttataactaacagcagcaacggctcgtaattacttatcatttactagacgaaaaggtggtgggatattttcttgctcaaataatacgaatatatcacccatccattttatgcgatgtttatatactctaatctttaatagatctatagacgacgggtttaccaacaatatagattttatcgattcatctaatttaaacccttccttaaacgtgaatgatctattatctggcataacgatgactctacctgatgaatcggacaatgtactgggccatgtagaataaattatcaacgaattatcgtctacgaacatttatatcatttgttttaattttaggacgcgaataaatggatataaaatagaaaataacagatattacaaccagtgttatggccgcgcccaaccaggtaggcagttttattttatcttttactacaggttctcctggatgtacgtcaccaacggcggacgtagttctagtacaattagacgtaagttccgcttgggaattttttaacgctaaagagttaacgttaatcgtgcacccaacgtatttacatctagttctttgaacatcttgattataatataaccattttctatctctagattcgtcggtgcactcatgtaaccaacataccctaggtcctaaatatttatctccggaattagattttggataattcgcgcaccaacaatttctatttcctttatgatcgttacaaaagacgtataatgccgtatccccaaaagtaaaataatcaggacgaataattctaataaactcagaacaatatctcgcatccatatgtttggagcaaatatcggaataagtagacatagccggtttccgttttgcacgtaaccattctaaacaattggggtttccaggatcgtttctacaaaatccagtcatgaaatcgtcacaatgttctgtcttgtaattattattaaatatttttggacagtgtttggtatttgtcttagaacaacattttgctacgctatcactatcgcccaggagataatccttttttataaaatgacatcgttgcccggatgctatataatcagtagcgtgttttaaatccttaatatattcaggagttacctcgttctgataatagattaatgatccaggacgaaatttgaaagaactacatggttctccatgaattaatacatattgtttagcaaattcaggaactataaaactactacaatgatctatcgacataccatctatcaaacaaaacttgggtttaatttctcccggagatgtttcataatagtacgtataactttcttctgcaaacttaacagctctattatattcaggataattaaaacctaattccatatatttgtctcgtatatctgctattcctggtgctattttgattctattaagagtaacagctgcccccattcttaataatcgtcagtatttaaactgttaaatgttggtatatcaacatctaccttatttcccgcagtataaggtttgttgcaggtatactgttcaggaatggttacatttatacttcttctatagtcctgtctttcgatgttcatcacatatgcaaagaacagaataaacaaaataatgtaagaaataatattaaatatctgtgaattcgtaaatacattgattgccataataattacagcagctacaatacacacaatagacattcccacagtgttgccattacctccacgatacatttgagttactaagcaataggtaataactaagctagtaagaggcaatagaaaagatgagataaatatcatcaatatagagattagaggagggctatatagagccaagacgaacaaaatcaaaccgagtaacgttctaacatcattatttttgaagattcccaaataatcattcattcctccataatcgttttgcatcatacctccatctttaggcataaacgattgctgctgttcctctgtaaataaatctttatcaagcactccagcacccgcagagaagtcgtcaagcatattgtaatatcttaaataactcatttatatattaaaaaatgtcactattaaagatggagtataatctttatgccgaactaaaaaaaatgacttgtggtcaacccctaagtctttttaacgaagacggggatttcgtagaagttgaaccgggatcatcctttaagtttctgatacctaagggattttacgcctctccttccgtaaagacgagtctagtattcgagacattaacaacgaccgataataaaatcactagtatcaatccaacaaatgcgccaaagttatatcctcttcaacgcaaagtcgtatctgaagtagtttctaatatgaggaaaatgatcgaatcaaaacgtcctctatacattactcttcacttggcgtgtggatttggtaagactattaccacgtgttatcttatggctacacacggtagaaaaaccgtcatttgcgtacccaataaaatgttaatacatcaatggaagacacaggtagaggcagtcggattggaacataagatatccatagatggagtaagtagtctattaaaggaactaaagactcaaagtccggatgtattaatagtagtcagtagacatctgacaaacgatgccttttgtaaatatatcaataagcattatgatttgttcatcttggatgaatcacatacgtataatctgatgaacaatacagcagttacaagatttttagcgtattatcctccgatgatgtgttattttttaactgctacacctagaccatctaacagaatttattgtaacagtattattaatattgccaagttatccgatctaaaaaaaactatctatgcggtagatagtttttttgagccatattccacagacaatattagacatatgataaaacgattagatggaccatctaataaatatcatatatatactgagaagttattatctgtagacgagcctagaaatcaacttattcttgataccctggtagaagaattcaagtcaggaactattaatcgcattttagttattactaaactacgtgaacatatggtattcttctacaaacgattattagatcttttcggaccagaggttgtatttataggagacgcccaaaatagacgtactccagatatggtcaaatcaatcaaggaactaaatagatttatattcgtatccaccttattttattccggtactggtttagatattcctagtttggattcgttgttcatttgctcggcagtaatcaacaatatgcaaatagagcaattactagggagggtatgtcgagaaacagaactattagataggacggtatatgtatttcctaacacatccatcaaagaaataaagtacatgataggaaatttcatgcaacgaattattagtctgtctgtagataaactaggatttaaacaaaaaagttatcggaaacatcaagaatccgatcccacttctgtatgtacaacatcctccagagaagaacgtgtattaaatagaatatttaactcgcaaaatcgttaagaagtttaagcgacgatccgcatgctgcgcaggccagtgtattacccctcatagtattaatataatccaatgatacttttgtgatgtcggaaatcttaaccaatttagactgacaggcagaacacgtcatgcaatcatcatcgtcatcgataactgtagtcttgggcttctttttgcggctcttcattccggaacgcacattggtgctatccatttaggtagtaaaaaataagtcagaatatgccctatagcacgatcgtgcaaaacctggtatatcgtctctatctttatcacaatatagtgtatcgacatctttattattattgacctcgtttatcttggaacatggaatgggaacatttttgttatcaacggccatctttgccttaattccagatgttgtaaaattataactaaacagtctatcatcgacacaaatgaaattcttgtttagacgtttgtagtttacgtatgcggctcgttcgcgtctcattttttcagatattgcaggtactataatattaaaaataagaatgaaataacataggattaaaaataaagttatcatgacttctagcgctgatttaactaacttaaaagaattacttagtctgtacaaaagtttgagattttcagattctgcggctatagaaaagtataattctttggtagaatggggaacatctacttactggaaaataggcgtgcaaaaggtagctaatgtcgagacgtcaatatctgattattatgatgaggtaaaaaataaaccgtttaatattgatccgggctattacattttcttaccggtatattttgggagcgtctttatttattcgaagggtaaaaatatggtagaacttggatctggaaactcttttcaaataccagatgatatgcgaagtgcgtgtaacaaagtattagacagcgataacggaatagactttctgagatttgttttgttaaacaatagatggataatggaagatgctatatcaaaatatcagtctccagttaatatatttaaactagctagtgagtacggattaaacatacccaaatatttagaaattgaaatagaggaagacacattatttgacgacgagttatactctattatagaacgctctttcgatgataaatttccaaaaatatccatatcgtatattaagttgggagaacttaggcggcaagttgtagactttttcaaattctcgttcatgtatattgagtccatcaaggtagatcgtataggagataatatttttattcctagcgttataacaaaatcaggaaaaaagatattagtaaaagatgtagaccatttaatacgatccaaggttagagaacatacatttgtaaaagtaaaaaagaaaaacacattttccattttatacgactatgatggaaacggaacagaaactagaggagaagtaataaaacgaattatagacactataggacgagactattatgttaacggaaagtatttctctaaggttggtagtgcaggcttaaagcaattgactaataaattagatattaatgagtgcgcaactgtcgatgagttagttgatgagattaataaatccggaactgtaaaacgaaaaataaaaaaccaatcagcatttgatttaagcagagaatgtttgggatatccagaagcggattttataacgttagttaataacatgcggttcaaaatagaaaattgtaaggttgtaaatttcaatattgaaaatactaattgtttaaataacccgagtattgaaactatatatggaaactttaaccagttcgtctcaatctttaatatcgtcaccgatgtcaaaaaaagattattcgagtgaaataatatgcgcctttgatataggtgcaaaaaatcctgccagaactgttttagaagtcaaggataactccgttagggtattggatatatcaaaattagactggagttctgattgggaaaggcgcatagctaaagatttgtcacaatatgaatacactacagttcttctagaacgtcagcctagaaggtcgccgtatgttaaatttatctattttattaaaggctttttatatcatacatcggctgccaaagttatttgcgtctcgcctgtcatgtctggtaattcatatagagatcgaaaaaagagatcggtcgaagcatttcttgattggatggacacattcggattgcgagactccgttccggatagacgcaaattagacgatgtagcggatagtttcaatttggctatgagatacgtattagataaatggaatactaattatacaccttataataggtgtaaatctagaaattacataaaaaaaatgtaataacgttagtaacgccattatggataatctatttacctttctacatgaaatagaagatagatatgccagaactatttttaactttcatctaataagttgcgatgaaataggagatatatatggtcttatgaaagaacgcatttcctcagaggatatgtttgataatatagtgtataataaagatatacatcctgccattaagaaactagtgtattgcgacatccaacttactaaacacattattaatcagaatacgtatccggtatttaacgattcttcacaagtgaaatgttgtcattatttcgacataaactcagataatagcaatattagctctcgtacagtagagatatttgagagggaaaagtcatctcttgtatcatatattaaaactaccaataagaagagaaaggtcaattacggcgaaataaagaaaactgttcatggaggcactaatgcaaattacttttccggtaaaaagtctgacgagtatctgagtactacagttagatccaacattaatcaaccttggatcaaaaccatctctaagaggatgagagttgatatcattaatcactctatagtaacgcgtggaaaaagctctatattacaaactatagaaattatttttactaatagaacatgtgtgaaaatattcaaggattctactatgcacattattctatccaaggacaaggatgaaaaggggtgtatacacatgattgacaaattattctatgtctattataatttatttctgttgttcgaggatatcatccaaaacgagtactttaaagaagtagctaatgttgtaaaccacgtactcacggctacggcattagatgagaaattattcctaattaagaaaatggctgaacacgatgtttatggagttagcaatttcaaaatagggatgtttaacctgacatttattaagtcgttggatcataccgttttcccctctctgttagatgaggatagcaaaataaagttttttaaggggaaaaagctcaatattgtagcattacgatctctggaggattgtataaattacgtgactaaatccgagaatatgatagaaatgatgaaggaaagatcgactattttaaatagcatagatatagaaacggaatcggtagatcgtctaaaagaattgcttctaaaatgaaaaaaaacactgattcagaaatggatcaacgactcggatataagtttttggtgcctgatcctaaagccggagttttttatagaccgttacatttccaatatgtatcgtattctaattttatattgcatcgattgcatgaaatcttgaccgtcaagcggccactcttatcgtttaagaataatacagaacgaattatgatagaaattagcaatgttaaagtgactcctccagattactcacctataatcgcgagtattaaaggtaagagttatgacgcattagccacgttcactgtaaatatctttaaagaggtaatgaccaaagagggtatatccatcactaaaataagtagttatgagggaaaagattctcatttgataaaaattccgctactaataggatacgggaataaaaatccacttgatacagccaagtatcttgttcctaatgtcataggtggagtctttatcaataaacaatctgtcgaaaaagtaggaattaatctagtagaaaagattacaacatggccaaaatttagggttgttaagccaaactcattcactttctcgttttcctccgtatcccctcctaatgtattaccgacaagatatcgccattacaagatatctctggatatatcacaattggaagcgttgaatatatcatcgacaaagacatttataacggtcaatattgttttgctgtctcaatatttatctagagtgagtctagaattcattagacgtagtttatcatacgatatgcctccagaagttgtctatctagtaaacgcgataatagatagtgctaaacgaattactgaatctattactgactttaatattgatacatacattaatgacctggtggaagctgaacacattaaacaaaaatctcagttaacgattaacgagttcaaatatgaaatgctgcataactttttacctcatatgaactatacacccgatcaactaaagggattttatatgatatctttactaagaaagtttctctactgtatcttccacacttctagatatccagatagagattcgatggtttgtcatcgcatcctaacgtacggcaaatattttgagacgttggcacatgatgaattagagaattacataggcaacatccgaaacgatatcatgaacaatcacaagaacagaggcacttacgcggtaaacattcatgtactaacaactcccggacttaatcacgcgttttctagcttattgagtggaaagttcaaaaagtcagacggtagttatcgaacacatcctcactattcatggatgcagaatatttctattcctaggagtgttggattttatccggatcaagtaaagatttcaaagatgttttctgtcagaaaataccatccaagtcaatatctttacttttgttcatcagacgttccggaaagaggtcctcaggtaggtttagtatctcaattgtctgtcttgagttccattacaaatatactaacgtctgagtatttggatttggaaaagaaaatttgtgagtatatcagatcatattataaagatgatataagttactttgaaacaggatttccaatcactatagaaaatgctctagtcgcatctcttaatccaaatatgatatgtgattttgtaactgactttagacgtagaaaacggatgggattcttcggtaacttggaggtaggtattactttagttagggatcacatgaatgaaattcgcattaatattggagcgggaagattagtcagaccattcttggttgtggataacggagagctcatgatggatgtgtgtccggagttagaaagcagattagacgacatgacattctctgacattcagaaagagtttccgcatgtcatcgaaatggtagatatagaacaatttacttttagtaacgtatgtgaatcggttcaaaaatttagaatgatgtcaaaggatgaaagaaagcaatacgatttatgtgactttcctgccgaatttagagatggatatgtggcatcttcattagtgggaatcaatcacaattctggacccagagctattcttggatgtgctcaagctaaacaagctatctcttgtctgagttcggatatacgaaataaaatagacaatggaattcatttgatgtatccagagaggccaatcgtgattagtaaggctttagaaacttcaaagattgcggctaattgcttcggccaacatgttactatagcattaatgtcgtacaaaggtatcaatcaagaggatggaattatcatcaaaaaacaatttattcagagaggcggtctcgatatagttaccgcaaagaaacatcaagtagaaattccattggaaaactttaataacaaagaaagagataggtctaacgcctattcaaaattagaaagtaatggattagttagactgaatgctttcttggaatccggagacgctatggcacgaaatatctcatcaagaactcttgaagatgattttgctagagataatcagattagcttcgatgtttccgagaaatataccgatatgtacaaatctcgcgttgaacgagtacaagtagaacttactgacaaagttaaggtacgagtattaaccatgaaagaaagaagacccattctaggagacaaatttaccactagaacgagtcaaaagggaacagtcgcgtatgtcgcggatgaaacggaacttccatacgacgaaaatggtatcacgccagatgtcattattaattctacatccatcttctctagaaaaactatatctatgttgatagaagttattttaacagccgcatattctgctaagccgtacaacaataagggagaaaaccgacctgtctgttttcctagtagtaacgaaacatccatcgatacatatatgcaattcgctaaacaatgttatgagcattcaaatccgaaattgtctgatgaagaattatcggataaaatcttttgtgaaaagattctctatgatcctgaaacggataagccttatgcatccaaagtattttttggaccaatttattacttgcgtctgagacatttaactcaggacaaggcaaccgttagatgtagaggtaaaaagacgaagctcattagacaggcgaatgagggacgaaaacgtggaggaggtatcaagttcggagaaatggagagagactgtttaatagcgcatggcgcagccaatactattacagaagttttgaaagattcggaagaagattatcaagatgtgtatgtttgtgaaaattgtggagacatagcagcacaaatcaagggtattaatacatgtcttagatgttcaaaacttaatctctctcctctcttaacaaaaattgataccacgcacgtatctaaagtatttcttactcaaatgaacgccagaggcgtaaaagtcaaattagatttcgaacgaagacctccttcgttttataaaccattagataaagttgatctcaagccgtcttttctggtgtaatattctagtttggtagtagatacatatcaatatcatcaaattcgagatccgaattataaaatgggcgtggattgttaactatagaatcggacgtctgatattcgaaaatctgtggagtttcaggttttggtggaggtgtaactgctacttgggatactgaagtctgatattcagaaagctgtggatgttctggttcggcatccaccgatggtgtcacatcactaatcggttcggtaacgtctgtggatggaggtgctacttctacagaacctgtagcctcagttgtcaacggagatacatttttaatgcgagaaaatgtataatttggtaatggtttctcatgtggatctgaagaagaggtaagatatctactagaaagataccgatcacgttctagttctcttttgtagaacttaactttttctttctccgcatctagttgatattccaacctcttcacgttactacgttcagattccaattcacgttcgcatgggttacctccgcagtttttacgagcgatttcacgttcagccttcatgcgtctctccctctctctatcgagtttatcagagcagtctttctgaaggcgatcgaactccataaatttctccaacgctttgattgtttccatagatttccgaacttcagcttctaggacggcgattctttttctttcgaattcacagctggatgtacaaccgtttccattaccgccatctctaagtttcttttctagatcggcaacatttcatccccatgccttttacattcctcgagtctactgtcgtcgaaatatcgttccagctccttttcgacatcaataactttagcacgttgtctctcaagctctcttttgtagttatctgattccctggcacgtttaagatcttcatgcaattgagtcagctcttaacttcctctcttgcttcttcgtcatagtacgcgcaatcactgtgagatccattgttaccacgtctacactcggcgagctcgcgtttaagagattcaatttcccgtttgtattggtccatgtttccattgctaccaccattagatttacaggctgctagttgtcgttcgagatcagaaatacgggttttcttggaattgatttcgtcgatgtacttggcatcgaaacacttattaagttctttttccaattctacgattttatttctttcgcgagtcaattccctcctgtagtaactatctgttttgtcagattcacgctctctacgtagactttcttgcaagttactaatttgttccctagcacgtccgagtttagttttatatgctgaatagagttctgattcatcctttgagcagatctctagcgatcgtttaagattcctgattctagtctttagcctatttacctcctcagaagatgttccgttaccgttgcgtttacactcgttaagctgtctatcaagatccatgattctatctctaagacgttgcatctctctttccatatcagcattgctttcattattacgtctgcagtcactcaactgtctttcaatatctgagattctatctctaagacgtcgcatctctctctgtttcagcattggtttcattattacgtctacagtcgttcaactgtctttcaagatctgatattctagattggagtctgctaatctctgtagcattttcacggcattcactcagttgtctttcaagatctgaaattttagattggagtctgctaatctctgtaagatttcctcctccgctctcgatgcagttggtcaacttattctctagttctctaatacgcgaacgcagtgcatcaacttcttgcgtgtcttcctggttgcgtgtacattcatcgagtctagattcgagatctctaacgcgtcgtcgttcttcctcaagttctctgcgtactacagaaagcgtgtccctatcttgttgatatttagcaatttctgattctagagtactgattttgcttacgtagttactaatagttgtcttggccttatcaagatcctccttgtatttgtcgcattccttgatatccctacgaagtctggacagttcccattcgacattacgacgtttatcgatttcagctcggagatcgtcatcgcgttgttttagccacatacgactgagttcaagttctcgttgacaagatccatctacttttccattcctaatagtatccagttccttttctagttctgaacgcatttctcgttccctatcaagcgattctctcaattctcggatagtcttcttatcaatttctaataaatctgaaccatcatctgtcccattttgaatatccctgtgttctttgatctcttttgtaagtcggtcgattctttcggttttataaacagaatccctttccaaagtcctaatcttactgagtttatcactaagttctgcattcaattcggtgagttttctcttggcttcttccaactctgttttaaactctccactatttccgcattcttcctcgcatttatctaaccattcaattagtttattaataactagttggtaatcagcgattcctatagccgttcttgtaattgtgggaacataattaggatcttctaatggattgtatggcttgatagcatcatctttatcattattagggggatggacaaccttaattggttggtcctcatctcctccagtagcgtgtggttcttcaataccagtgttagtaataggcttaggcaaatgcttgtcgtacgcgggcacttcctcatccatcaagtatttataatcgggttctacttcagaatattcttttctaagagacgcgacttcgggagttagtagaagaactctgtttctgtatctatcaacgctggaatcaatactcaagttaaggatagcgaatacctcatcgtcatcatccgtatcttctgaaacaccatcatatgacatttcatgaagtctaacgtattgataaatagaatcagatttagtattaaacagatccttaacctttttagtaaacgcatatgtatattttagatctccagatttcataatatgatcacatgccttaaatgtcagtgcttccatgatataatctggaacactaatgggtgacgaaaaagatacagcaccatatgctacgttgataaataaatctgaaccactaagtagataatgattaatgttaaggaaaagaaaatattcagtgtataggtatgtcttggcgtcatatcttgtactaaacacgctaaacagtttgttaatgtgatcaatttccaatagattaattagagcagcgggaataccaacaaacatattaccacatccgtattttctatgaatatcacatatcatgttaaaaaatcttaatagaagagcgaatatctcgtctgacttaatgagacgtagttcagcagcaacataagtcataactgtaaatagaacatactttcctgtagtgttgattctagactccacatcaacaccattattaaaaatagttttatatacatctttaatctgctctccgttaatcgtcgaacgttctagtatacggaaacactttgatttcttatctgtagttaatgacttagtgatatcacgaagaatattacgaattacatttcttgtttttcttgagagacctgattcagaactcaactcatcgttccatagtttttctacctcagtggcgaaatctttggagtgcttggtacatttttcaataaggttcgtgacctccatttattataaaaaatttattcaaaacttaactacaatcgggtaattataagatcgtaaatctcccatgtggcggaatactaccatctatcgcatgtggatggacagtaggtaatggccatgggaacagtaatgattgcatatttatctttcttgctagtattactgcatattgtcccaatgtttcgatgtgatgttctaacctatcaactgccgctgtatcacaacaatagtgtccgatgaaattaagattatgatccaatgtgtttaatatatgattatcaagtcttatacgatccgcgtcttttttgacaggatcaggttcttctacaggaagaagtttcggcctcttatgatattcatgtctgggaaacggtggtctagggtgaggctccggtatcggagtgggttttggattataatcatcatcgtctatgacatcatcatcatcttcgacttcgatatttattttgctatcttgatgatgtcctgtatcagttgcattttcagcactcgactgaatattagcgcattcattgtctattattaccatatttctaaacccaaaatgtatgtgttgaacatcagtactatcgttgatgagtcttatagcatgaattcgcttatcgttatcgggtttatcttctgtcaccttagcaattccttttttattaaactctacataatcatatccatttctattgtttgttctaatataaacgagtatagcatcattgctaaatttttcaatagtatcgaaaacagaatatcctaaaccatataatatatattcagggacactcaaactaaatgtccaggattctcctaaatacgtaaactttaatagtgcgaaatcattcaaaaatctaccacttatagatagatagtacataaatgcgtatagtagtctacctatctctttattatgaaaaccggcattacgatcatatatgtcgtgatatacctgtgatccgtttacgttaaaccataaatacatgggtgatcctataaacatgaatttatttctaattctcagagctatagttaattgaccgtgtaatatttgcttacatgcatacttgatacgctcattaataaaatttttatcattgctcgttatctcagaatcgtatatataaggagtaccatcgtgattcttaccagatattatacaaaatactatatataaaatatattgaccaacgttagtaatcatataaatgtttaacgttttaaattttgtattcaatgatccattatcatacgctagcatggtcttatgatattcattctttaaaatataatattgtgttagccattgcattggggctcctaatggagattttttattctcatccattttaggataggctttcataaagtccctaataacttcgtgaataatgtttctatgttttctactgatgcatgtatttgcttcgatttttttatcccatgtttcatctatcatagatttaaacgcagtaatgctcgcaacattaacatcttgaaccgttggtacaattccgttccataaatttataatgttcgccatttatataactcattttttgaatatacttttaattaacaaaagagttaagttactcatatgggcgccgtccagtctgaacatcaatctttttagccagagatatcatagccgctcttagagtttcagcgtgattttccaacctaaatagaacttcatcgttgcgtttacaacacttttctatttgttcaaactttgttgttacattagtaatctttttttccaaattagttagccgttgtttgagagtttcctcattgtcgtcttcatcggctttaacaattgcttcgcgtttagcctctggctttttagcagcctttgtagaaaaaaattcagttgctggaattgcaagatcgtcatctccggggaaaagagttccgtccatttaaagtacagattttagaaactgacactctgcgttatttatatttggtacaacacatggattataaatatcgatgttaataacatcagaaaatgtaaagtctatacattgttgcatcgtgttaaattttctaatggatctagtattattgggtccaacttctgcctgaaatccaaatatggaagcggatacaaaaccgtttcctggataaaccacacatctccacttttgctttacatcagaaattgtgtcgttgacatcttgaactctcctatctaatgccggtgttccacctatagattttgaatattcgaatgctgcatgagtagcattaaattccttaatattgccataattttcatatattgagtaaccctggataaaaagtaaacacaccgcagccgtcgctaccacaataaaaaaaattgatagagagttcatttataatctattagaagctgacaaaatttttttacacgcatcagacaatgctttaataaatagttcaacatctacttttgtcatatcgaaccgatggtatgattctaacctagaattacatccgaaaaagttgactatgttcatagtcattaagtcattaacaaacaacattccagactctggattataagacgatactgtttcgtcacaattacctaccttaatcatgtgattatgaatattggctattagagcaccttctaagaaatctataatatctttgaaacacgatttaaaatcaaaccacgaatatacttctacgaagaaagttagtttacccataggagaaataactataaatggagatctaaatacaaaatccggatctatgatagttttaacattattatattctctattaaatacctccacatctaaaaatgttaattttgaaactatgtcttcgtttattaccgtacctgaactaaacgctataagctctattgtttgagaactctttaaacgatattcttgaaatacatgtaacaaagtttcctttaactcggtcggtttatctaccatagttacagaatttgtatccttatctataatataataatcaaaatcgtataaagttatataattatcgcgttcagattgggatcttttcaaatagactaaaaaccccatttctctagtaagtatcttatgtatatgtttgtaaaatatcttcatggtgggaatatgctctaccgcagttagccattcctcattgacagcggtagatgtattagacaaaactattccaatgtttaacaagggccattttacgagattattaaatccttgtttgataaatgtagccaatgagggttcgagttcaacgacgattgaattctcttcccgcggatgctgcatgatgaacgacgggatgttgttcgattgatttggaattctttttcgactttttgtttatattaaatattttaaaatttatagcggatagcaattcatgtaccacggataatgtagacgcgtattgcgcatcgatatctttattattagataaatttatcaataaatgtgagaagtttgcctcgttaaggtcttccatttaaatattatataaacatttgtgtttgtatcttattcgtcttttatggaatagttttttactagtaaagctgcaattacacactttgtccgtaaaacataaatataaacaccagcttttatcaatcgttccaaaaagtcgacggcggacatttttaacatggcatctattttaaatacacttaggtttttggaaaaaacatcattttataattgtaacgattcaataactaaagaaaagattaagattaaacataagggaatgtcatttgtattttataagccaaagcattctaccgttgttaaatacttgtctggaggaggtatatatcatgatgatttggttgtattggggaaggtaacaattaatgatctaaagatgatgctattttacatggatttatcatatcatggagtgacaagtagtggagcaatttacaaattgggatcgtctatcgatagactttctctaaataggactattgttacaaaagttaataattatgatgatacattttttgacgacgatgattgatcgctattgcacaattttgtttttttactttctaatatagcgtttagattctttttcatgtgcgaatattgatttactaaaatatcgatgtttaacttttgttctatgacgtccttatcagcggtatcggtacatatacgtaattcaccttcacaaaatacggagtcttcgataataatagccaatcgattattggatctagcggtctgtatcatattcaacatgtttaatatatcctttcgtttcccctttacaggcatcgatcgtagcatattttccgcgtctgagatggaaatgttaaaactacaaaaatgcgtaatgttagcccgtcctaatattggtacgtgtctataagtttggcatagtagaataatagacgtgtttaaatgccttccaaagtttaagaattctattagagtattgcattttgatagtttatcgcctacatcatcaaaaataagtaaaaagtgtgctgattttttatgattttgtgcgacagcaatacatttttctatgttacttttagttcgtatcagattatattctagagattcctgactactaacgaaattaatatgatttggccaaatgtatccatcataatctggattataaacgggtgtaaacaagaatatatgtttatattttttaactagtgtagaaaacagagatagtaaatagatagtttttccagatccagatcctcccgttaaaaccattctaaacggcatttttaataaattttctcttgaaaattgtttttcttggaaacaattcataattatatttacagttactaaattaatttgataataaatcaaaatatggaaaactaaggtcgttagtagggaggagaacaaagaaggcacatcgtgacataaataacatttattatcatgatgacaccagaaaacgacgaagagcagacatctgtgttctccgctactgtttacagagacaaaattcagggaaagaataaacgcaaacgcgtgattggtctatgtattagaatatctatggttatttcactactatctatgattaccatgtccgcgtttctcatagtgcgcctaaatcaatgcatgtctgctaacgaggctgctattactgacgccgctgttgccgttgctgctgcatcatctactcatagaaaggttgcgtctagcactacgcaatatgatcacaaagaaagctgtaatggtttatattaccagggttcttgttatatattacattcagactaccagttattctcggatgctaaagcaaattgcactgcggaatcatcaacactacccaataaatccgatgtcttgactacctggctcattgattatgttaaggatacatggggatctgatggtaatccaattacaaaaactacatccgattatcaagattctgatgtatcacaagaagttagaaagtatttttgtgttaaaacaatgaactaatatttatttttgtacattaataaatgaaatcgcttaatagacaaactgtaagtaggtttaagaagttgtcggtgccggccgctataatgatgatactctcaaccattattagtggcataggaacatttctgcattacaaagaagaactgatgcctagtgcttgcgccaatggatggatacaatacgataaacattgttatttagatactaacattaaaatgtctacagataatgcggtttatcagtgtcgtaaattacgagccagattgcctagaccggatactagacatctgagagtattgtttagtattttttataaagattattgggtaagtttaaaaaagaccaatgataaatggttagatattaataatgataaagatatagatattagtaaattaacaaattttaaacaactaaacagtacgacggatgctgaagcgtgttatatatacaagtctggaaaactggttaaaacagtatgtaaaagtactcaatctgtactatgtgttaaaaaattctacaagtgacaacaaaaaatgaattaataataagtcgttaacgtacgccgccatggacgccgcgtttgttattactccaatgggtgtgttgactataacagatacattgtatgatgatctcgatatctcaatcatggactttataggaccatacattataggtaacataaaaactgtccaaatagatgtacgggatataaaatattccgacatgcaaaaatgctactttagctataagggtaaaatagttcctcaggattctaatgatttggctagattcaacatttatagcatttgtgccgcatacagatcaaaaaataccatcatcatagcatgcgactatgatatcatgttagatatagaagataaacatcagccattttatctattcccatctattgatgtttttaacgctacaatcatagaagcgtataacctgtatacagctggagattatcatctaatcatcaatccttcagataatctgaaaatgaaattgtcgtttaattcttcattctgcatatcagacggcaatggatggatcataattgatgggaaatgcaatagtaattttttatcataaaagttgtaaagtaaataataaaacaataaatattgaactagtagtacgtatattgagcaatcagaaatgatgctggtacctcttatcacggtgaccgtagttgcgggaacaatattagtatgttatatattatatatttgtaggaaaaagatacgtactgtctataatgacaataaaattatcatgacaaaattaaaaaagataaagagttctaattccagcaaatctagtaaatcaactgatagcgaatcagactgggaggatcactgtagtgctatggaacaaaacaatgacgtagataatatttctaggaatgagatattggacgatgatagcttcgctggtagtttaatatgggataacgaatccaatgttatggcgcctagcacagaacacatttacgatagtgttgctggaagcacgctgctaataaataatgatcgtaatgaacagactatttatcagaacactacagtagtacttaatgaagataccaaacagaatcctaactattcatccaatcctttcgtaaattataataaaaccagtatttgtagcaagtcaaatccgttcattacagaactcaacaataaatttagtgagaataatccgtttagacgagcacatagcgatgattatcttaataagcaagaacaagatcatgaacacgatgatatagaatcattggtgtgattagtttcctttttataaaattgaagtaatatttagtattattgctgccgtcacgttgtacaaatggagatattccctgtattcggcatttctaaaattagcaattttattgctaataatgactgtagatattatatagatacagaacatcaaaaaattatatctgatgagatcaatagacagatggatgaaacggtacttcttaccaacatcttaagcgtagaagttgtaaatgacaatgagatgtaccatcttattcctcatagattatcgacgattatactctgtattagttctgtcggaggatgtgttatctctatagataatgacgtcaatggcaaaaatattctaacctttcccattgatcatgctgtaatcatatccccactgagtaaatgtgtcgtagttagcaagggtcctacaaccatattggttgttaaagcggatatacctagcaaacgattggtaacatcgtttacaaacgacatactgtatgtaaacaatctatcactgattaattatttgccgttgtctgtattcattattagacgagttaccgactatttggatagacacatatgcgatcagatatttgcgaataataagtggtattccattataaccatcgacaataagcagtttcctattccatcaaactgtataggtatgtcctctgccaagtacataaattctagcatcgagcaagatactttaatacatgtttgtaacctcgagcatccattcgacttagtatacaaaaaaatgcagtcgtacaattctgtacctatcaaggaacaaatattgtacggtagaattgataatataaatatgagcattagtatttctgtggattaatagatttctagtatggggatcattaatcatctctaatctctaaatacctcataaaacgaaaaaaaagctattatcaaatactgtacggaatggattcattctcttctctttttatgaaactctgttgtatatctactgataaaactggaagcaaaaaatctgataaaaagaataagaataagatcaaggattattataaaataacaatagttcctggttcctcttccacgtctactagctcgtggtattatacacatgcctagtaatagtctctttgcgttgacggaaagcagactagaaataacaggctaaaatgttcagacaccataatagttcccaacccagataataacagagtaccatcaacacattcctttaaactcaatcccaaacccaaaaccgttaaaatgtatccggccaattgatagtagataatgaggtgtacagcgcatgataatttacacagtaaccaaaatgaaaatactttagtaattataagaaatatagatggtaacgtcatcatcaacaatccaataatatgccggagagtaaacattgacggataaaacaaaaatgctccgcataactctatcatggcaataacacaaccaaatacttgtaagattcctaaattagtagaaaatacaacggatatcgatgtataagtgatctcgagaaataataagaataaagtaatgcccgtaaagataaacatcaacattgtttggtaatcattaaaccaattagtatgaagttgaactaatttcacagtagattttattccagtattatccccgcatgtataagtacctggtaagatatctttatattccataatcaatgagacatcactatctgataacgaatgaagtctagcactagtatgccatttacttaatattgtcgtcttggaagttttattataagttaaaatatcatggttatccaatttccatctaatatactttgtcggattatctatagtacacggaataatgatggtatcattacatgctgtatactctatggtctttgtagttgttataacaaccaacgtatagaggtatatcaacgatattctaactcttgacattttttatttatttaaaatgatacctttgttatttattttattctattttgctaacggtattgaatggcataagtttgaaacgagtgaagaaataatttctacttacttattagacgacgtattatacacgggtgttaatggggcggtatacacattttcaaataataaactaaacaaaactggtttaactaataataattatataacaacatctataaaagtagaggatgcggaaccaataacggaaatcccaaatgttggaaaatagacggttcagacgacccaaaacatagaggtagaggatacgctccttatcaaaatagcaaagtaacgataatcagtcacaacggatgtgtactatctgacataaacatatcaaaagaaggaattaaacgatggagaagatttgacggaccatgtggttatgatttatacacggcggataacgtaattccaaaagatggtttacgaggagcattcgtcgataaagatggtacttatgacaaagtttacattcttttcactgatactatcggctcaaagagaattgtcaaaattccgtatatagcacaaatgtgcctaaacgacgaaggtggtccatcatcattgtctagtcatagatggtcgacgtttctcaaagtcgaattagaatgtgatatcgacggaagaagttatagacaaattattcattctagaactataaaaacagataatgatacgatactatatgtattcttcgatagtccttattccaagtccgcattatgtacctattctatgaataccattaaacaatctttttctacgtcaaaattggaaggatatacaaagcaattgccgtctccagctcctggtatatgtttaccagctggaaaagttgttccacataccacgtttgaagtcatagaaaaatataatgtactagatgatattataaagcctttatctaaccaacctatcttcgaaggaccgtctggtgttaaatggttcgatataaaggagaaggaaaatgaacatcgggaatatagaatatacttcataaaagaaaattctatatattcgttcgatacaaaatctaaacaaactcgtagctcgcaagtcgatgcgcgactattttcagtaatggtaacttcgaaaccgttatttatagcagatatagggataggagtaggaatgccacaaatgaaaaaaatacttaaaatgtaatcttaatcgagtacaccgcacgacaatgaacaaacataagacagattatgctggttatgcttgctgcgtaatatgcggtctaattgttggaattatttttacagcgacactattaaaagttgtagaacgtaaattagttcatacaccatcaatagataaaacgataaaagatgcatatattagagaagattgtcctactgactggataagctataataataaatgtatccatttatctactgatcgaaaaaacctgggaggaaggacgtaatgcatgcaaagctctaaatccaaattcggatctaattaagatagagactccaaacgagttaagttttttaagaagccttagacgaggctattgggtaggagaatccgaaatattaaaccagacaaccccatataattttatagctaaaaatgccacgaagaatggaactaaaaaacggaaatatatttgtagtacaacgaatactcccaaactgcattcgtgttacactatataacaattacactacatttttatcataacactacttcggttagatgttttagaaaaaaataaatatcgccgtaccgttcttgtttttataaaaataacaattaacaattatcaaattttttctttaatattttacgtggttgaccattcttggtggtaaaataatctcttagtgttggaatggaatgctgtttaatgtttccgcactcatcgtatattttgacgtatgcagtcacatcgtttacgcaatagtcagactgtagttctatcatgcttcctacatcagaaggaggaacagttttaaagtctcttggttttaatctattgccattagttttcatgaaatcctttgttttatccacttcacattttaaataaatgtccactatacattcttctgttaattttactagatcgtcatgggtcatagaatttataggttccgtagtccatggatccaaactagcaaacttcgcgtatacggtatcgcgattagtgtatacaccaactgtatgaaaattaagaaaacagtttaataaatcaacagaaatatttaatcctccgtttgatacagatgcgccatatttatggatttcggattcacacgttgtttgtctgaggtgttcgtctagtgttgcttctacgtaaacttcgattcccatatattctttattgtcagaatcgcataccgatttatcatcatacactgtttgaaaactaaatggtatacacatcaaaataataaataataacgagtacattctgcaatattgttatcgtaattggaaaattagtgttcgagtgagtcggattatgtgagtactggattgtatattttattttatattttgtaataagaataaaatgctaatgtcaagtttattccaatagatgtcttattaaaaaacatatataataaataacaatggctgaatggcataaaattatcgaggatatctcaaaaaataataagttcgaggatgccgccatcgttgattacaagactacaaagaatgttctagctgctattcctaacagaacatttgccaagattaatccgggtgaaattattcctctcatcactaatcgtaatattctaaaacctcttattggtcagaaatattgtattgtatatactaactctctaatggatgagaacacgtatgctatggagttgcttactgggtacgcccctgtatctccgatcgttatagcgagaactcataccgcacttatatttttgatgggtaagccaacaacatccagacgtgatgtgtatagaacgtgtagagatcacgctacccgtgtacgcgcaactggtaattaaaataaaaagtaatattcatatgtagtgtcaattttaaatgatgatgatgaaatggataatatccatattgacgatgtcaataatgccggtattggcatacagctcatcgatttttagatttcattcagaggatgtggaattatgttatgggcatttgtattttgataggatctataatgtagtaaatataaaatataatccgcatattccatatagatataattttattaatcgcacgttaaccgtagatgaactagacgataatgtcttttttacacatggttattttttaaaacacaaatatggttcacttaatcctagtttgattgtctcattatcaggaaacttaaaatataatgatatacaatgctcagtaaatgtatcgtgtctcattaaaaatttggcaacgagtacatctactatattaacatctaaacataagacttattctctacatcggtccacgtgtattactataataggatacgattctattatatggtataaagatataaatgacaagtataatgacatctatgattttactgcaatatgtatgctaatagcgtctacattgatagtgaccatatacgtgtttaaaaaaataaaaatgaactcttaattatgctatgctattagaaatggataaaatcaaaattacggttgattcaaaaattggtaatgttgttaccatatcgtataacttggaaaagataactattgatgttacacctaaaaagaaaaaagaaaaggatgtattattagcgcaatcagttgctgtcgaagaggcaaaagatgtcaaggtagaagaaaaaaatattatcgatattgaagatgacgatgatatggatgtagaaagcgcataatacgatctataaaaataagtatataataaatactttttatttacggtactcttgtagtggtgataccctactcaattatttttttaaaaaaatacttattctgattcttctagccatttccgtgttcgttcgaatgccacatcgacgttaaagataggggagtagttgaaatctagttctgcattgttggtacgcacctcaaatgtagtgttggatatcttcaacgtatagttgttgagtagtgatggttttctaaatagaattctcttcatatcattcttgcacgcgtacatttttagcatccatcttggaattctagatccttgttctattcccaatggtttcatcaatagaagattaaacatatcgtacgaacacgatggagagtaatcgtagcaaaagtaagcatttcctttaatcttagatcccggatactggatatattttgcagccaacacgtgcatccatgcagcatttcctacatatacccggctatgcaccgcgtcatcatcgactgtacgatacataatgttaccgtgttgcttacattgctcgtaaaagactttcgtcaatttgtctccttctccgtaaattccagtgggtcttaggcaacaagtatacaattttgctccattcatgattacggaattattggctttcataaccagttgctcggccatacgtttactttttgcgtatacatgtcctggtgatatatcataaagggtatgctcatggccgatgaatggatcaccgtgtttattgggtcctattgcttccatgctactagtatagatcaaatacttgattcctaggtccacacaagctgccaatatagtctgtgttccataatagtttactttcatgatttcattatcggtgtattttccaaatacatccactagagcagccgtatgaataatcagatttaccccatctagcgcttctctcaccttatcaaagtcgtttatatcacattgtatatagtttataaccttaactttcgaggttattggttgtggatcttctacaatatctatgactctgatttcttgaacatcatctgcactaattaacagttttactatatacctgcctagaaatccggcaccaccagtaaccgcgtacacggccattgctgccactcataatatcagactacttattctattttactaaataatggctgtttgtataatagaccacgataatatcagaggagttatttactttgaaccagtccatggaaaagataaagttttaggatcagttattggattaaaatccggaacgtatagtttgataattcatcgttacggagatattagtcaaggatgtgattccataggcagtccagaaatatttatcggtaacatctttgtaaacagatatggtgtagcatatgtttatttagatacagatgtaaatatatttacaattattggaaaggcgttatctatttcaaaaaatgatcagagattagcgtgtggagttattggtatttcttacataaatgaaaagataatacattttcttacaattaacgagaatggcgtttgatatatcagttaatgcgtctaaaacaataaatgcattagtttacttttctactcagcaaaataaattagtcatacgtaatgaagttaatgatacacactacactgtcgaatttgatagggacaaagtagttgacacgtttatttcatataatagacataatgacaccatagagataagaggggtgcttccagaggaaactaatattggttgcgcggttaatacgccggttagtatgacttacttgtataataagtatagttttaaactgattttagcagaatatataagacacagaaatactatatccggcaatatttattcggcattgatgacactagatgatttggctattaaacagtatggagacattgatctattatttaatgagaaacttaaagtagactccgattcgggactatttgactttgtcaactttgtaaaggatatgatatgttgtgattctagaatagtagtagctctatctagtctagtatctaaacattgggaattgacaaataaaaagtataggtgtatggcattagccgaacatatatctgatagtattccaatatctgagctatctagactacgatacaatctatgtaagtatctacgcggacacactgagagcatagaggatgaatttgattattttgaagacgatgattcgtctacatgttctgccgtaaccgacagggaaacggatgtataattttttttatagcgtgaaggatatgataaaaaatataattgttgtatttatcccattccaatcaccttatatgattctgtaaaaaaattatactgtaacacaataaaggagtcttatagatgtatagaggtcagatactggtttgataaactgtttattccacataagtatgtttgactttatggttagacccgcatactttaacaaatcactgaaaattggagttaggtattgacctctcagaatcagttgccgttctggaacattaaatgtattttttatgatatactccaacgcatttatgtgggcatacaacaagtcattactaatggagtattccaagagttttagttgtctagtatttaacaagagaagagatttcaacagactgtttatgaactcgaacgccgcctcattgtcgcttatattgatgatgtcgaattctcccaatatcatcactgatgagtagctcatcttgttatcgggatccaagttttctaaagatgtcattaaaccctcgatcatgaatggatttatcatcatcgtttttatgttggacatgagcttagtccgtttgtccacatctatagacgacgatttctgaattatttcatatatccctctctttaactccaggaacttgtcaggatggtctactttaatatgttctcgtctaagagatgaaaatctttggatggttgcacgcgacttttctttaaaggatgacgttgcccaagatcctctcttaaatgaatccatcttatccttggacaagatggacagtctattttccttagatggtttaatatttttgttacccatgatctataaaggtagacctaatcgtctcggatgaccatatatttattttcagttttattatacgcataaattgtaaaaaatatgttaggtttacaaaaatgtctcgtggggcattaatcgtttttgaaggattggacaaatctggaaaaacaacacaatgtatgaacatcatggaatctataccggcaaacacgataaaatatcttaactttcctcagagatccactgtcactggaaagatgatagatgactatctaactcgtaaaaaaacctataatgatcatatagttaatctattattttgtgcaaatagatgggagtttgcatcttttatacaagaacaactagaacagggaattactttaatagttgatagatacgcattttctggagtagcgtatgccgccgctaaaggcgcgtcaatgactctcagtaagagttatgaatctggattgcctaaacccgacttagttatattcttggaatctggtagcaaagaaattaatagaaacgtcggcgaggaaatttatgaagatgttacattccaacaaaaggtattacaagaatataaaaaaatgattgaagaaggagatattcattggcaaattatttcttctgaattcgaggaagatgtaaagaaggagttgattaagaatatagttatagaggctatacacacggttactggaccagtggggcaactgtggatgtaatagtgaaattacattttttataaatagatgttagtacagtgttataaatggatgaagcatattactctggcaacttggaatcagtactcggatacgtgtccgatatgcataccgaactcgcatcaatatctcaattagttattgccaagatagaaactatagataatgatatattaaacaaggacattgtaaattttatcatgtgtagatcaaacttggataatccatttatctctttcctagatactgtatatactattatagatcaagagatctatcagaccgaattgattaattcattagacgacaatgaaattatcgattgtatagttaacaagtttatgagcttttataaggataacctagaaaatatagtagatgctatcattactctaaaatatataatgaataatccagattttaaaactacgtatgccgaagtactcggttccagaatagccgatatagatattaaacaagtgatacgtaagaatatactacaattgtctaatgatatccgcgaacgatatttgtgaaaaatattaaaaaaaaatactttttttattaaatgacgtcgcttcgcgaatttagaaaattatgctgtgatatatatcacgcatcaggatataaagaaaaatctaaattaattagagactttataacagatagggatgataaatatttgatcattaagctattgcttcccggattagacgatagaatttataacatgaacgataaacaaattataaaattatatagtataatatttaaacaatctcaggaagatatgctacaagatttaggatacggatatataggagacactattaggactttcttcaaagagaacacagaaatccgtccacgagataaaagcattttaactttagaagaagtggatagttttttaactacgttatcatccgtaactaaagaatcgcatcaaataaaattattgactgatgtagcatctgtttgtacatgtaatgatttaaaatgtgtagtcatgcttattgataaagatctaaaaattaaagcgggccctcggtacgtacttaacgctattagtcctcatgcctatgatgtgtttagaaaatctaataacttgaaagagataatagaaaatgcatctaaacaaaatctagactctatatctatttctgttatgactccaattaatcccatgttagcggaatcgtgtgattctgtcaataaggcgtttaaaaaatttccatcaggaatgtttgcggaagtcaaatacgatggtgaaagagtacaagttcataaaaataataacgagtttgccttctttagtagaaacatgaaaccagtactctctcataaagtggattatctcaaagaatacataccgaaagcatttaaaaaagctacgtctatcgtattggattctgaaattgttcttgtagacgaacataatgtaccgctaccgtttggaagtttaggaatacacaaaaagaaagaatataaaaactctaacatgtgtttgttcgtgtttgactgtttgtactttgatggattcgatatgacggacattccattgtacgaacgaagatcttttctcaaagatgttatggttgaaatacccaatagaatagtattctcagagttgacgaatattagtaacgagtctcagttaactgacgtattggatgatgcactaacgagaaaattagaaggattggtcttaaaagatattaatggagtatacgaaccgggaaagagaagatggttaaaaataaagcgagactatttgaacgagggttccatggcagattctgccgatttagtagtactaggtgcctactatggtaaaggagcaaagggtggtatcatggcagtctttctaatgggttgttacgacgatgaatccggtaaatggaagacggttaccaagtgttcaggacacgatgataatacgttaagggagttgcaagaccaattaaagatgattaaaattaacaaggatcccaaaaaaattccagagtggttagtagttaataaaatctatattcccgattttgtagtagaggatccgaaacaatctcagatatgggaaatttcaggagcagagtttacatcttccaagtcccataccgcaaatggaatatccattagatttcctagatttactaggataagagaggataaaacgtggaaagaatctactcatctaaacgatttagtaaacttgactaaatcttaatagttacatacaaactgaaaattaaaataacaccatttagttggtggtcgccatggatggtgttattgtatactgtctaaacgcgttagtaaaacatggcgaggaaataaatcatataaaaaatgatttcatgattaaaccatgttgtgaaagagtttgtgaaaaagtcaagaacgttcacattggcggacaatctaaaaacaatacagtgattgcagatttgccatatatggataatgcggtatccgatgtatgcaattcactgtataaaaagaatgtatcaagaatatccagatttgctaatttgataaagatagatgacgatgacaagactcctactggtgtatataattattttaaacctaaagatgttattcctgttatcatatctataggaaaggataaagatgtctgtgaactattaatctcatcagacatatcgtgtgcatgcgtggagttaaattcatatcacgtagccattcttcccatgaatgtttccttttttaccaaaggaaatgcctcgttgattattctcctgtttgatttctctatcgatgcagcacctctcttaagaagtgtaaccgataataatgttattatatctagacaccagcgtctacatgacgagcttccgagttccaattggttcaagttttacataagtataaagtccgactattgttctatattatatatggttgttgatggatctgtgatgcatgcgatagctgataatagaactcacgcaattattagcaaaaatatattagacaatactacaattaacgatgagtgtagatgctgttattttgaaccacagattaggattcttgatagagatgagatgctcaatggatcatcgtgtgatatgaacagacattgtattatgatgaatttacctgatgtaggcgaatttggatctagtatgttggggaaatatgaacctgacatgattaagattgctctttcggtggctggtaatttaataagaaatcgagactacattcccgggagacgaggctatagctactacgtttacggtatagcctctagataatttttttaagcacgaaataaaaaacataattttaaaccaatctatttcatactattttgtgtgatcaccatggacataaagatagatattagtatttctggtgataaatttacggtgactactaggagggaaaatgaagaaagaaaaaaatatctacctctccaaaaagaaaaaactactgatgttatcaaacctgattatcttgagtacgatgacttgttagatagagatgagatgtttactattctagaggaatattttatgtacagaggtctattaggcctcagaataaaatatggacgactctttaacgaaattaaaaaattcgacaatgatgcggaagaacaattcggtactatagaagaactcaagcagaaacttagattaaattctgaagagggagcagataactttatagattatataaaggtacaaaaacaggatatcgtcaaacttactgtatacgattgcatatctatgataggattgtgtgcatgcgtggtagatgtttggagaaatgagaaactgttttctagatggaaatattgtttacgagcgattaaactgtttattaatgatcacatgcttgataagataaaatctatactgcagaatagactagtatatgtggaaatgtcatagaaagttaatgagagcaaaaatatataaggttgtattccatatttgttattttttctgtaatagttaaaaaaatacattcgatggtctatctatcagattattatgtgttataaggtactttttctcataataaactagagtatgagtaagatagtgtttttcaaaacatataaatctaaaattgatggatgagatatacagctattaatttcgaaaatatataaatctaaaattgatggataagatatacagctattaatttcgaaaatatattttaatctgataactttaaacatggatttttgatggtggtttaacgttttaaaaaaagattttgttattgtagtatatgataatattaaaagatggatataaagaatttgctgactgcatgtactattttttacattactacattggctacggcagatatacctactccgccaccaacgggtcatgtgacaagggagaatatcttgataagaggcataatcaatgttgtaatcggtgtccacctggagaatttgccaaggttagatgtaatggtaacgataacacaaaatgtgaacgctgcccacctcatacatataccacaatccccaattattctaatggatgtcatcaatgtagaaaatgcccaaccggatcatttgataaggtaaagtgtaccggaacacagaacagtaaatgttcgtgtcttcctggttggtattgcgctactgattcttcacagactgaagattgttgaaattgtgtaccaaaaaggagatgtccatgcggatactttggtggaatagatgaacaaggaaatcctatttgtaaatcgtgctgtattggtgaatattgcaactacctacgtaattatagacttgatccattttctccatgcaaactatctaaatgtaattaattatgattttgatgataatgttaccatacattatatcgctacttggttagtgtattattcagtatgaagacctattaataattacttatcttttgacgatcttgttataattataatataaaaacttatggcatagtaactcataattgctgacgcgataaattcgtaataatctgttttgttcaaatttttataaggaatctacaggcataaaaataaaaatataatttataatatactcttacagcgcgccatcatgaatagcagcagtaaattaattgctgttattaatggatttagaaatagtggacgattttgtgatattaatatagttattaatgatgaaaggataaacgctcacagactcatcctatctggagcctccgaatatttttccattctgttttccaataattttatcgattctaatgaatacgaagttaatctaagtcatttagattatcaaagtgttaacgatttgatcgattacatttatgggatacctttgagcctaactaacgataacgtgaaatatattctttcaaccgctgattttttacaaattggatctgccattactgagtgcgaaaaatacatacttaaaaatctttgttctagaaactgtatcgatttctacatatacgctgataaatataataacaagaaaatagaatcagcgtcgtttaacacaatattacgaaatattttgagactcatcaacgatgaaaactttaaatacttaacagaggaatcaatgataaaaattttaagcgatgatatgttaaatataaaaaatgaggattttgcaccactaattctcattaaatggttagagagtactcaacaatcatgcaccgtcgagttacttagatgcctcagaatatcattgctttccccacaagttataaaatcactttatagtcatcaactggttagttcaatctacgaatgtataacattcttaaacaatatagcattcttggatgaatcatttcctagataccatagcatcgagttgatatctatcggtataagtaattcgcatgataagatttccataaactgctacaatcataaaaaaaatacatgggaaatgatatcttcacgtagatataggtgtagtttcgcagtggccgtcctggataatattatctatatgatgggtggatatgatcagtccccgtatagaagttcaaaggttatagcgtacaatacatgtacaaattcttggatatatgatataccagagctaaaatatcctcgttctaattgtgggggactggctgatgacgaatacatttattgtataggcggcatacgcgatcaggattcatcgttgacatctagtattgatagatggaagccatcaaaaccatattggcagaagtatgctaaaatgcgcgaaccaaaatgtgatatgggggttgcgatgttaaacggattaatatatgtcatgggtggaatcgttaaaggtgacacgtgtaccgacgcactagagagtttatcagaagatggatggatgaagcatcaacgtcttccaataaaaatgtccaatatgtcgacgattgttcatgatggcaagatttatatatctggaggttacaacaatagtagtgtagttaatgtaatatcgaatctagtccttagctataatccgatatatgatgaatggaccaaattatcatcattaaacattcctagaattaatcccgctctatggtcagcgcataataaattatatgtaggaggaggaatatctgatgatgttcgaactaatacatctgaaacatacgataaagaaaaagattgttggacattggataatggtcacgtgttaccacgcaattatataatgtataaatgcgaaccgattaaacataaatatccattggaaaaaacacagtacacgaatgattttctaaagtatttggaaagttttataggtagttgatagaacaaaatacataattttgtaaaaataaatcactttttatactaatatgacacgattaccaatacttttgttactaatatcattagtatacgctacaccttttcctcagacatctaaaaaaataggtgatgatgcaactctatcatgtaatcgaaataatacaaatgactacgttgttatgagtgcttggtataaggagcccaattccattattcttttagctgctaaaagcgacgtcttgtattttgataattataccaaggataaaatatcttacgactctccatacgatgatctagttacaactatcacaattaaatcattgactgctagagatgccggtacttatgtatgtgcattctttatgacatcaactacaaatgacactgataaagtagattatgaagaatactccacagagttgattgtaaatacagatagtgaatcgactatagacataatactatctggatctacacattcaccagaaactagttctgagaaaccagaggatatagataattttaattgctcgtcggtattcgaaatcgcgactccggaaccaattactgataatgtagaagatcatacagacaccgtcacatacactagtgatagcattaatacagtaagtgcatcatctggagaatccacaacagacgagactccggaaccaattactgataaagaagaagatcatacagtcacagacactgtctcatacactacagtaagtacatcatctggaattgtcactactaaatcaaccaccgatgatgcggatctttatgatacgtacaatgataatgatacagtaccaccaactactgtaggcggtagtacaacctctattagcaattataaaaccaaggactttgtagaaatatttggtattaccgcattaattatattgtcggccgtggcaatattctgtattacatattatatatataataaacgttcacgtaaatacaaaacagagaacaaagtctagatttttgacttacataaatgtctgggatagtaaaatctatcatattgagcggaccatctggttcaggaaagacagccatagccaaaagactatgggaatatatttggatttgtggtgtcccataccactagatttcctcgtcctatggaacgagaaggtgtcgattaccattacgttaacagagaggccatctggaagggaatagccgccggaaactttctagaacatactgagtttttaggaaatatttacggaacttctaaaactgctgtgaatacagcggctattaataatcgtatttgtgtgatggatctaaacatcgatggcgttagaagtcttaaaaatacgtacctaatgccttactcggtgtatataagacctacctctcttaaaatggttgagaccaagcttcgttgtagaaacactgaagcggatgatgagattcatcgtcgtgtgatgttggcaaaaactgacatggatgaggcaggtgaagccggtctattcgacactattatcattgaagatgatgtgaatttagcatatagtaagttaattcagatactacaggaccgtattagaatgtattttaacactaattagagacttaagacttaaaacttgataattaataatataactcgtttttatatgtggctatttcaacgtctaatgtattagttaaatattaaaacttaccacgtaaaacttaaaatttaaaatgatatttcattgacagatagatcacacattatgaactttcaaggacttgtgttaactgacaattgcaaaaatcaatgggtcgttggaccattaataggaaaaggtggattcggtagtatttatactactaatgacaataattatgtagtaaaaatagagcccaaagctaacggatcattatttaccgaacaggcattttatactagagtacttaaaccatccgttatcgaagaatggaaaaaatctcacaatataaagcacgtaggtcttatcacgtgcaaggcatttggtctatacaaatccattaatgtggaatatcgattcttggtaattaatagattaggtgcagatctagatgcggtgatcagagccaataataatagattaccaaaaaggtcggtgatgttgatcggaatcgaaatcttaaataccatacaatttatgcacgagcaaggatattctcacggagatattaaagcgagtaatatagtcttggatcaaatagataagaataaattatatctagtggattacggattggtttctaaattcatgtctaatggcgaacatgttccatttataagaaatccaaataaaatggataacggtactctagaatttacacctatagattcgcataaaggatacgttgtatctagacgtggagatctagaaacacttggatattgtatgattagatggttgggaggtatcttgccatggactaagatatctgaaacaaagaattgtgcattagtaagtgccacaaaacagaaatatgttaacaatactgcgactttgttaatgaccagtttgcaatatgcacctagagaattgctgcaatatattaccatggtaaactctttgacatattttgaggaacccaattacgacgagtttcggcacatattaatgcagggtgtatattattaagtgtggtgtttggtcgatgtaaaatttttgtcgataaaaattaaaaaataacttaatttattattgatctcgtgtgtacaaccgaaatcatggcgatgttttacgcacacgctctcggtgggtacgacgagaatcttcatgcctttcctggaatatcatcgactgttgccaatgatgtcaggaaatattctgttgtgtcagtttataataacaagtatgacattgtaaaagacaaatatatgtggtgttacagtcaggtgaacaagagatatattggagcactgctgcctatgtttgagtgcaatgaatatctacaaattggagatccgatccatgatcaagaaggaaatcaaatctctatcatcacatatcgccacaaaaactactatgctctaagcggaatcgggtacgagagtctagacttgtgtttggaaggagtagggattcatcatcacgtacttgaaacaggaaacgctgtatatggaaaagttcaacatgattattctactatcaaagagaaggccaaagaaatgaatgcactcagttcaggacctatcatcgattaccacgtctggataggagattgtatctgtcaagttactgctgtggacgtacatggaaaggaaattatgagaatgagattcaaaaagggtgcggtgctacagatcccaaatctggtaaaagttaaacttggggagaatgatacagaaaatctttcttctactatatcggcggcaccatcgaggtaaccacctctcaagaagaccgcgtgaataatgtactcatgaaacgtttggaaactatacgccatatgtggtctgttgtatatgatcattttgatattgtgaatggtaaagaatgctgttatgtgcatacgcattcatctaatcaaaatcctataccgagtactgtaaaaacaaatttgtacatgaagactatgggatcatgcattcaaatggattccatggaagctctagagtatcttagcgaactgaaggaatcaggtggatggagtcccagaccagaaatgcaggaatttgaatatccagatggagtggaagacactgaatcaattgagagattggtagaggagttcttcaatagatcagaacttcaggctggtaaattagtcaaatttggtaattctattaattgttaaacatacatctgtttcagctaagcaactaagaacacgtatacggcagcagcttccttttatactctcatcttttaccaacacaaagggtggatatttgttcattggagttgataataatacacacaaagtatttggattcacggtgggttacgactacctcagactgatagagaatgatatagaaaagcatatcaaaagactttgtgttgtgcatttctgtgagaagaaagaggacatcaagtacacgtgtcgattcatcaaggtatataaacctggggatgaggctacctcgacatacgtgtgcgctatcaaagtggaaagatgctgttgtgctgtgtttgcagattggccagaatcatggtatatggatactaatggtatcaagaagtattctccagatgaatgggtgtcacatataaaattttaattaatgtaactatagagaacaaataataggttgtaatatcatatagacaataactaacaattaattagtaactgttatctcttttttaactaaccaactaactatatacctattaatacatcgtaattatagttcttaacatctattaatcattgattcgcttctttaattttttataaactaacattgttaattgaaaagggataacatgttacagaatataaattatatatggatttttttaaaaaggaaatacttgactggagtgtatatttatctcttcattatatagcacgcgtgtgttccaattcttccacatcccatataatacaggattataatctcgttcgaacatacgagaaagtggataaaacaatagttgattttttatctaggttgccaaatttattccatattttagaatatggggaaaatattctacatatttattctatggatgatgctaatacgaatattataattttttttctagatagagtattaaatattaataagaacgggtcatttatacacaatctcaggttatcatcatccattaatataaaagaatatgtatatcaattagttaataatgatcatccagataataggataagactaatgcttgaaaatggacgtagaacaagacattttttgtcctatatatcagatacagttaatatctatatatgtattttaataaatcatggattttatatagatgcagaagacagttacggttgtacattattacatagatgtatatatcactataagaaatcagaatcagaatcatacaatgaattaattaagatattgttaaataatggatccgatgtagataaaaaagatacgtacggaaacacaccttttatcctattatgtaaacacgatatcaacaacgtggaattgtttgagatatgtttagagaatgctaatatagactctgtagactttaatagatatacacctcttcattatgtctcatgtcgtaataaatatgattttgtaaagttattaatttctaaaggagcaaatgttaatgcgcgtaataaattcggaactactccattttattgtggaattatacacggtatctcgcttataaaactatatttggaatcagacacagagttagaaatagataatgaacatatagttcgtcatttaataatttttgatgctgttgaatctttagattatctattatccagaggagttattgatattaactatcgtactatatacaacgaaacatctatttacgacgctgtcagttataatgcgtataatacgttggtctatctattaaacagaaatggtgattttgagacgattactactagtggatgtacatgtatttcggaagcagtcgcaaacaacaacaaaataataatggaagtactattgtctaaacgaccatctttgaaaattatgatacagtctatgatagcaattactaaaaataaacaacataatgcagatttattgaaaatgtgtataaaatatactgcgtgtatgaccgattatgatactcttatagatgtacagtcgctacagcaatataaatggtatattttaaaatgtttcgatgaaatagatatcatgaagagatgttatataaaaaataaaactgtattccaattagttttttgtatcaaagacattaatactttaatgagatatggtaaacatccttctttcgtgaagtgcactagtctcgacgtatacggaagtcgtgtacgtaatatcatagcatctattagatatcgtcagagattaattagtctattatccaagaagctggatgcgggagataaatggtcgtgttttcctaacgaaataaaatataaaatattggaaaactttaacgataacgaactatccacatatctaaaaatcttataaacactattaaaatataaaatctaagtaggataaaatcacactacatcattgtttccttttagtgctcgacagtgtatactatttttaacactcataaataaaaatgaaaacgatttccgttgttacgttgttatgcgtactacctgctgttgtttattcaacatgtactgtacccactatgaataacgctaaattaacgtctaccgaaacatcgtttaatgataaacagaaagttacatttacatgtgatcagggatatcattctttggatccaaatgctgtctgcgaaacagataaatggaaatacgaaaatccatgcaagaaaatgtgcacagtttctgattatgtctctgaattatatgataagccattatacgaagtgaattccaccatgacactaagttgcaacggcgaaacaaaatattttcgttgcgaagaaaaaaatggaaatacttcttggaatgatactgttacgtgtcctaatgcggaatgtcaacctcttcaattagaacacggatcgtgtcaaccagttaaagaaaaatactcatttggggaatatatgactatcaactgtgatgttggatatgaggttattggtgcttcgtacataagttgtacagctaattcttggaatgttattccatcatgtcaacaaaaatgtgatataccgtctctatctaatggattaatttccggatctacattttctatcggtggcgttatacatcttagttgtaaaagtggttttatactaacgggatctccatcatccacatgtatcgacggtaaatggaatcccatactcccaacatgtgtacgatctaacgaaaaatttgatccagtggatgatggtcccgacgatgagacagatttgagcaaactctcgaaagacgttgtacaatatgaacaagaaatagaatcgttagaagcaacttatcatataatcatagtggcgttaacaattatgggcgtcatatttttaatctccgttatagtattagtttgttcctgtgacaaaaataatgaccaatataagttccataaattgctaccgtaaatataaatccgttaaaataattaataatttaataacaaacaagtatcaaaagattaaagacttatagctagaatcaattgagatgtcttcttcagtggatgttgatatctacgatgccgttagagcatttttactcaggcactattataacaagagatttattgtgtatggaagaagtaacgccatattacataatatatacaggctatttacaagatgcgccgttataccgttcgatgatatagtacgtactatgccaaatgaatcacgtgttaaacaatgggtgatggatacacttaatggtataatgatgaatgaacgcgatgtttctgtaagcgttggcaccggaatactattcatggaaatgtttttcgattacaataaaaatagtatcaacaatcaactaatgtatgatataattaatagcgtatctataattctagctaatgagagatatagaagcgcttttaacgacgatggtatatacatccgtagaaatatgattaacaagttgtacggatacgcatctctaactactattggcacgatcgctggaggtgtttgttattatctgttgatgcatctagttagtttgtataaataattatttcaatatactagttaaaattttaagattttaaatgtataaaaaactaataacgtttttatttgtaataggtgcattagcatcctattcgaataatgagtacactccgtttaataaactgagtgtaaaactctatatagatggagtagataatatagaaaattcatatactgatgataataatgaattggtgttaaattttaaagagtacacaatttctattattacagagtcatgcgacgtcggatttgattccatagatatagatgttataaacgactataaaattattgatatgtataccattgactcgtctactattcaacgcagaggtcacacgtgtagaatatctaccaaattatcatgccattatgataagtacccttatattcacaaatatgatggtgatgagcaacaatattctattactgcagagggaaaatgctataaaggaataaaatatgaaataagtatgatcaacgatgatactctattgagaaaacatactcttaaaattggatctacttatatatttgatcgtcatggacatagtaatacatattattcaaaatatgatttttaaaaatttaaaatatattatcacttcagtgacagtagtcaaataacaaacaacaccatgagatatattataattctcgcagttttgttcattaatagtatacacgctaaaataactagttataagtttgaatccgtcaattttgattccaaaattgaatggactggggatggtctatacaatatatcccttaaaaattatggcatcaagacgtggcaaacaatgtatacaaatgtaccagaaggaacatacgacatatccgcatttccaaagaatgatttcgtatctttctgggttaaatttgaacaaggcgattataaagtggaagagtattgtacgggactatgcgtcgaagtaaaaattggaccaccgactgtaacattgactgaatacgacgaccatatcaatttgtacatcgagcatccgtatgctactagaggtagcaaaaagattcctatttacaaacgcggtgacatgtgtgatatctacttgttgtatacggctaacttcacattcggagattctaaagaaccagtaccatatgatatcgatgactacgattgcacgtctacaggttgcagcatagactttgtcacaacagaaaaagtgtgcgtgacagcacagggagccacagaagggtttctcgaaaaaattactccatggagttcgaaagtatgtctgacacctaaaaagagtgtatatacatgcgcaattagatccaaagaagatgttcccaatttcaaggacaaaatggccagagttatcaagagaaaatttaataaacagtctcaatcttatttaactaaatttctcggtagcacatcaaatgatgttaccacttttcttagcatgcttaacttgactaaatattcataactaatttttattaatgatacaaaaacgaaataaaactgcatattatacactggttaacgcccttataggctctaaccattttcaagatgaggtccctgattatagtccttctgttcccctctatcatctactccatgtctattagacgatgtgagaagactgaagaggaaacatggggattgaaaatagggttgtgtataattgccaaagatttctatcccgaaagaactgattgcagtgttcatctcccaactgcaagtgaaggattgataactgaaggcaatggattcagggatatacgaaacaccgataaattataaaaaaagcaatgtgtccgctgtttccgttaataatactattttcgtaactggcggattattcataaataactctaatagcacgatcgtggttaacaatatggaaaaacttgacatttataaagacaaacaatggtcgattatagaaatgcctatggctagggtatatcacggcatcgactcgacatttggaatgttatattttgccggaggtctatccgttaccgaacaatatggtaatttagagaaaaacaacgagatatcttgttacaatcctagaacgaataagtggtttgatatttcatatactatttataagatatccatatcatcattgtgtaaactaaataacgtcttctatgtatttagtaaggacattggatatgtggaaaagtatgatggtgcatggaagttagtacatgatcgtctccccgctataaaggcattatcaacttctccttattgattgaaaatgaaaatataaatagtttttatgtatagcagtattaccctatagttttattgcttactactaacatggatacagatgttacaaatgtagaagatatcataaatgaaatagatagagagaaagaagaaatactaaaaaatgtagaaattgaaaataataaaaacattaacaagaatcatccaagtggatatattagagaagcactcgttattaatacaagtagtaatagtgattccattgataaagaagttatagaatgtatcagtcacgatgtaggaatatagatcatatctactaatttttataatcgatacaaaacataaaaaacaactcgttattacatagcaggcatggaatccttcaagtattgttttgataacgatggcaagaaatggattatcggaaatactttatattctggtaattcaatactatataaggtcagaaaaaatttcactagttcgttctacaattacgtaatgaaaatagatcacaaatcacacaagccattgttgtctgaaatacgattctatatatctgtattggatcctttgactatcgacaactggacacgggaacgtggtataaagtatttggctattccagatctgtatggaattggagaaaccgatgattatatgttcttcgttataaagaattcgggaagagtattcgccccaaaggatactgaatcagtcttcgaagcatgcgtcactatgataaacacgttagagtttatacactctcgaggatttacccatggaaaaatagaaccgaggaatatactgattagaaataaacgtctttcactaattgactattctagaactaacaaactatacaagagtggaaactcacatatagattacaacgaggacatgataacttcaggaaatatcaattatatgtgtgtagacaatcatcttggagcaacagtttcaaaacgaggagatttagaaatgttgggatattgcatgatagaatggttcggtggcaaacttccatggaaaaacgaaagtagtataaaagtaataaaacaaaaaaaagaatataaaaaatttatagctactttctttgaggactgttttcctgaaggaaatgaacctctggaattagttagatatatagaattagtatacacgttagattattctcaaactcctaattatgacagactacgtaaactgtttatacaagattgaaattatattctttttttatagagtgtggtagtgttacggatatctaatattaatattagactatctctatcgcgctacacgaccaatatcgattactatggatatcttcagggaaatcgcatcttctatgaaaggagagaatgtattcatttctccagcgtcaatctcgtcagtattgacaatactgtattatggagctaatggatccactgctgaacagctatcaaaatatgtagaaacggaggagaacacggataaggttagcgctcagaatatctcattcaaatccatgaataaagtatatgggcgatattctgccgtgtttaaagattcctttttgagaaaaattggcgataagtttcaaactgttgacttcactgattgtcgcactatagatgcaatcaacaagtgtgtagatatctttactgaggggaaaatcaatccactattggatgaaccattgtctcctgatacctgtctcctagcaattagtgccgtatactttaaagcaaaatggttgatgccattcgaaaaggaatttaccagtgattatcccttttacgtatctccgacggaaatggtagatgtaagtatgatgtctatgtacggcaaggcatttaatcacgcatctgtaaaggaatcattcggcaacttttcaatcatagaactgccatatgttggagatactagtatgatggtcattcttccagacaagattgatggattagaatccatagaacaaaatctaacagatacaaattttaagaaatggtgtaactctctggaagctacgtttatcgatgttcacattcccaagtttaaggtaacaggttcgtataatcttgtggatactctagtaaagtcaggactgacagaggtgttcggttcaactggagattatagcaatatgtgtaattcagatgtgagtgtcgacgctatgattcacaaaacgtatatagatgtcaatgaagagtatacagaagcagctgcagcaacttgtgcactggtgtcagactgtgcatcaacaattacaaatgagttctgtgtagatcatccgttcatctatgtgattaggcatgttgatggaaaaattcttttcgttggtagatattgctctccgacaactaattgttaaccattttttttaaaaaaatagaaaaaacatgtggtattagtgcaggtcgttgttcttccaattgcaattggtaagatgacggccaactttagtacccacgtcttttcaccacagcactgtggatgtgacagactgaccagtattgatgacgtcagacaatgtttgactgaatatatttattggtcgtcctatgcataccgcaacaggcaatgcgctggacagttgtattccacactcctctcttttagagatgatgcggaatcagtgttcatcgacattcgcgagctggtaaaaaatatgccgtgggatgatgtcaaagattgtacagaaatcatccgttgttatataccggatgagcaaaaaaccatcagagagatttcggccatcatcggactttgtgcatatgctgctacttactggggaggtgaagaccatcccactagtaacagtctgaacgcattgtttgtgatgcttgagatgctcaattacgtggattataacatcatattccggcgtatgaattgatgagttgtacatcttgacattttctttcttctcttctccctttcttctcttctcccttcctccctcttctccctttcccagaaacaaacttttttacccactataaaataaaatgagtatactacctattatatttcttcctatatttttttattcttcattcgttcagacttttaacgcgcctgaatgtatcgacaaagggcaatattttgcatcattcatggagttagaaaacgagccagtaatcttaccatgtcctcaaataaatacgctatcatccggatataatatattagatattttatgggaaaaacgaggagcggataatgatagaattataccgatagataatggtagcaatatgctaattctgaacccgacacaatcagactctggtatttatatatgcattaccacgaacgaaacctactgtgacatgatgtcgttaaatttgacaatcgtgtctgtctcagaatcaaatatagatcttatctcgtatccacaaatagtaaatgagagatctactggcgaaatggtatgtcccaatattaatgcatttattgctagtaacgtaaacgcagatattatatggagcggacatcgacgccttagaaataagagacttaaacaacggacacctggaattattaccatagaagatgttagaaaaaatgatgctggttattatacatgtgttttagaatatatatacagaggtaaaacatataacgtaaccagaattgtaaaattagaggtacgggataaaataataccttctactatgcaattaccagatggcattgtaacttcaataggtagtaatttgactattgcgtgtagagtatcgttgagacctcccacaacggatgcagacgtcttttggataagtaatggtatgtattacgaagaagatgatggggacggagacggtagaataagtgtagcaaataaaatctatatgaccgataagagacgtgttattacatcccggttaaacattaatcctgtcaaggaagaagatgctacaacgtttacgtgtatggcgtttactattcctagcatcagcaaaacagttactgttagtataacgtgaatgtatgttgttacatttccatgtcaattgagtttataagaatttttatacattatcttccaacaaacaattgacgaacgtattgctatgattaactcccacgatactatgcatattattaatcattaacttgcagactatacctagtgctattttgacatactcatgttcttgtgtaattgcggtatctatattattaaagtacgtaaatctagctatagttttattatttaattttagataatataccgtctccttatttttaaaaattgccacatcctttattaaatcatgaatgggaatttctatgtcatcgttagtatattgtgaacaacaagagcagatatctataggaaagggtggaatgcgatacattgatctatgtagttttaaaacacacgcgaactttgaagaatttatataaatcattccatcgatacatccttctatgttgacatgtatatatccaggaattcttttattaatgtcaggaaatgtataaactaaaacattgcccgaaagcggtgcctctatctgcgttatatccgttcttaacttacaaaatgtaaccaatacctttgcatgacttgttttgttcggcaacgttagtttaaacttgacgaatggattaattacaatagcatgatccgcgcatctattaagtttttttactttaacgcccttgtatgtttttacagagactttatctaaatttctagtacttgtatgtgttataaatataacgggatatagaactgaatcacctaccttagatacccaattacattttatcagatccagataataaacaaattttgtcgccctaactaattctatattgttatatattttacaattggttatgatatcatgtaataacttggagtctaacgcgcatcgtcgtacgtttatacaattgtgatttagtgtagtatatctacacatgtatttttccgcactatagtattctggactagtgataaaactatcgttatatctgtcttcaatgaactcatcgagatattgctctctgtcatattcatacacctgcataaactttctagacatcttacaatccgtgttattttaggatcatatttacatatttacgggtatatcaaagatgttagattagttaatgggaatcgtctataataatgaatattaaacaattatatgaggacttttaccacaaagcatcataaaaatgagtcgtcgtctgatttatgttttaaatatcaaccgcaaatcaactcataaaatacaagagaatgaaatatatacatattttagtcattgcaatatagaccatacttctacagaacttgattttgtagttaaaaactatgatctaaacagacgacaacatgtaactgggtatactgcactacactgctatttgtataataattactttacaaacgatgtactgaagatattattaaatcatgacgtaaatgtaacgatgaaaaccagtagcggacgtatgcctgtttatatattgcttactagatgttgcaatatttcacatgatgtagtgatagatatgatagacaaagataaaaaccacttattacatagagactattccaacctattactagagtatataaaatctcgttacatgttattaaaggaagaggatatcgatgagaacatagtatccactttattagataagggaatcgatcctaactttaaacaagacggatatacagcgttacattattattatttgtgtctcgcacacgtttataaaccaggtgagtgtagaaaaccgataacgataaaaaaggccaagcgaattatttctttgtttatacaacatggagctaatctaaacgcgttagataattgtggtaatacaccattccatttgtatcttagtattgaaatgtgtaataatattcatatgactaaaatgctgttgacttttaatccgaatttcaaaatatgtaataatcatggattaacgcctatactatgttatataacttccgactacatacaacacgatattcttgttatgttaatacatcactatgaaacaaatgttggagaaatgccgatagatgagcgtcgtatgatcgtattcgagtttatcaaaacatattctacacgtccggcagattcgataacttatttgatgaataggtttaaaaatataaatatttatacccgctatgaaggaaagacattattacacgtagcatgtgaatataataatacacacgtaatagattatcttatacgtatcaacggagatataaatgcgttaaccgacaataacaaacacgctacacaactcattatagataacaaagaaaattccccgtataccatcgattgtttactgtatatacttagatatattgtagataagaatgtgataagatcgttggtggatcaacttccatctctacctatcttcgatataaaatcatttgagaaattcatatcctactgtatacttttagatgacacattttacgataggcacgttaagaatcgcgattctaaaacgtatcgatacgcattttcaaaatacatgtcgtttgataaatacgatggtataataactaaatgtcacgacgaaacaatgttactcaaactgtccactgttctagacactacactatatgcagttttaagatgccataattcgaaaaagttaagaagatacctcaacgagttaaaaaaatataataacgataagtcctttaaaatatattctaatattatgaatgagagataccttaatgtatattataaagatatgtacgtgtcaaaggtatatgataaactatttcctgttttcacagataaaaattgtctactaacattactaccttcagaaattatatacgaaatattatacatgctgacaattaacgatctttataatatatcgtatccacctaccaaagtatagttgtatttttctcatgcgatgtgtgtaaaaaaactgatattatataaatattttagtgccgtataataaagatgacgatgaaaatgatggtacatatatatttcgtatcattattgttattgctattccacagttacgccatagacatcgaaaatgaaatcacagaattcttcaataaaatgagagatactctaccagctaaagactctaaatggttgaatccagcatgtatgttcggaggcacaatgaatgatatagccgctctaggagagccattcagcgcaaagtgtcctcctattgaagacagtcttttatcgcacagatataaagactatgtggttaaatgggagaggctagaaaagaatagacggcgacaggtttctaataaacgtgttaaacatggtgatttatggatagccaactatacatctaaattcagtaaccgtaggtatttgtgtaccgtaactacaaagaatggtgactgtgttcagggtatagttagatctcatattaaaaaacctccttcatgcattccaaaaacatatgaactaggtactcatgataagtatggcatagacttatactgtggaattctttacgcaaaacattataataatataacttggtataaagataataaggaaattaatatcgacgacattaagtattcacaaacgggaaagaaattaattattcataatccagagttagaagatagtggaagatacaactgttacgttcattacgacgacgttagaatcaagaatgatatcgtagtatcaagatgtaaaatacttacggttataccgtcgcaagaccacaggtttaaactaatactagatccaaaaatcaacgtaacgataggagaacctgccaatataacatgcactgctgtgtcaacgtcattattgattgacgatgtactgattgaatgggaaaatccatccggatggcttataggattcgattttgatgtatactctgttttaactagtagaggcggtattaccgaggcgaccttgtactttgaaaatgttactgaagaatatataggtaatacatataaatgtcgtggacacaactattattttgaaaaaacccttacaactacagtagtattggagtaaatacacaatgcatttttatatacattactgaataattattattattatttatatcgtatttgtgctataacgcgactatctaggtatttgtatctcactgatagagaacatataaatatagactctattaaacagttgtgtaaaatatcaaatcctaatagatgtggatgtacggctttacatgagtacttttataattatagatcagtcaacggaaaatacaagtatagatacaacggttactatcaatattatttatctagcgattatgaaaattataatgaatattattatgatgattatgatagaactggtatgaacagtgagagtgataatatatcaatcaaaacagaatatgaattctatgatgaaacacaagatcaaagtacacaactagtaggttacgacattaaactcaaaaccaatgaggatgattttatggctatgatagatcagtgggtgtccatgattatatagatgaatcaattaataaagtagtatatggaagagagtctcacgtaagatggcgggatatatggcaagaacataatgatggcgtatacagtataggaaaggagtgcatagataatatatacgaagacaaccataccgtagacgaattctacaagatagacagcgtatcagatgtagatgacgcggaacacatatctccgataactaatgatgtatctacacaaacatgggaaaagaaatcagagttagatagatacatggaaatgtatcctcgtcatagatatagtaagcattctgtctttaagggattttctgacaaagttagaaaaaatgatttagacatgaatgtggtaaaagaattactttctaacggtgcatctctaacaattaaggatagcagtaataaggatccaataaccgtttattttcgaagaacgataatgaatttagaaatgattgatattattaacaaacatacaactattgatgaacgaaagtatatagtacactcctatctaaaaaattataaaaatttcgattatccatttttcaggaagttagttttgactaataaacattgtctcaacaattattataatataagcgacagcaaatatggaacaccgctacatatattggcgtctaataaaaaattaataactcctaattacatgaagttattagtgtataacggaaatgatataaacgcacgaggtgaagatacacaaatgcgaactccattacacaaatatttgtgtaaatttgtatatcataatattgaatatggtatccgatactataatgaaaagattatagacgcatttatagagttaggagccgatctaactattccaaataacgatggaatgataccagtagtttactgtatacactcaaatgcagaatatggttataacaatattactaacataaagataatacgtaaactacttaatcttagtagacgtgcgtcacataatctatttagagatcgagtcatgcacgattatataagtaatacatatattgatcttgagtgtttagatattattagatcgttggatggattcgatatcaatggttactttgaaggacgtacaccacttcattgcgctatacaacataacttcactcagattgctaagtacttattagatcgaggagctgatatagtcgtacccaacacattgattatacatcagtacatacagtaaatagcatagatatggaggaggatacaaatatttcaaataaagttataaggtacaacactgtcaataatatatggaagacattacctaacttctggactggaactataaatccaggcgtggtctcgcataaagatgatatatatgttgtatgcgacatcaaagatgaaaaaaatgttaagacttgtatatttagatataacacgaatacgtataacggatgggaattggttacgacgacagaaagcagattatcagctctgcatactattcttcatgacaataccataatgatgttacattgttatgaatcgtatatgttacaagatacatttaatgtgtacactcgcgaatggaatcatatgtgtcatcaacattcgaatagttatatcatgtacaatatactacccatctactaaatataatagaataaaataaatgagtatgatcattttagataacgattgattttatcattaccgcttcattcttatattctttgcttacggaacctatatttagaaacatctactaacgattttttatgcttgcattattaatggtatgtaatatgattgattgtgtacgcaataccaatttgttaagtatgaatacggggtacaaacataaactgaaatttaacattatttatttatgatatatatcgttatcgttattgtttggtctataccatggatatctttaaagaactaatcttaaaacaccctgatgaaaatgttttgatttctccagtttctattttatctactttatctattctaaatcatggagcagctggttctacagctgaacaactatcaaaatatatagagaatatgaatgagaatacacccgatgataagaaggatgacaataatgacatggacgtagatattccgtattgtgcgacactagctaccgcaaataaaatatacggtagcgatagtatcgagttccacgcctccttcctacaaaaaataaaagacgattttcaaactgtaaactttaataatgctaaccaaacaaaggaactaatcaacgaatgggttaagacgatgacaaatggtaaaattaattccttattgactagtccgctatccattaatactcgtatgacagttgttagcgccgtccattttaaagcaatgtggaaatatccattttctaaacatcttacatatacagacaagttttatatttctaagaatatagttaccagtgttgatatgatggtgggtaccgagaataacttgcaatatgtacatattaatgaattattcggaggattctctattatcgatattccatacgagggaaactctagtatggtaattatactaccggacgacatagaaggtatatataacatagaaaaaaatataacagatgaaaaatttaaaaaatggtgtggtatgttatctactaaaagtatagacttgtatatgccaaagtttaaagtggaaatgacagaaccgtataatctggtaccgattttagaaaatttaggacttactaatatattcggatattatgcagattttagcaagatgtgtaatgaaactatcactgtagaaaaatttctacatacgacgtttatagatgttaatgaggagtatacagaagcatcggccgttacaggagtatttatgactaacttttcgatggtatatcgtacgaaggtctacataaaccatccattcatgtacatgattaaagacaacacaggacgtatactttttatagggaaatactgctatccgcaataaatataaacaaatagacttttatcacgtttatctatgtctaaatattacaaatagtaatagtataaactaaagctgataatacttaaaaaaataataatatcatttacaattaatagtataaactaaaaattaaacaaatcgttattataagtaatatcaaaatgatgatatacggattaatagcgtgtcttatattcgtgacttcatccatcgctagtccactttatattcccgttattccacccattacggaagataaatcgttcaatagtgtagaggtattagtttccttgtttagagatgaccaaaaagactatacggtaacttctcagttcaataactacactatcgataccaaagactggactatcggcgtactatccacacctgatggtttggatataccattgactaatataacttattggtcacggtttactataggtcgtgcattgttcaaatcagagtctgaggatattttccaaaagaaaatgagtattctaggtgtttctatagaatgtaagaagtcgtcgacattacttacttttttgaccgtgcgtaaaatgactcgagtatttaataaatttccagatatggcttattatcgaggagactgtttaaaagccgtttatgtaacaatgacttataaaaatactaaaactggagagactgattacacgtacctctctaatggggggttgcctgcatactatcgtaatggggtcgatggttgattattgattagtatattccttattcacacaaaaagaacatttttataaacatgaaaccactgtctaaatgtaattatgatcttgatttatagatgaagatcagcctttagaggattttaaccagtatgtttaatatgaaaaaaataaacataacatattttgagattaagcgctattgtgcttaattattttgctctataaactgaatatatagccacaattattgacgggcttgtttatgaccggcaatcatgaatttacagaaattatctctggctatatatcttactgcgacatgttcgtggtgttatgaaacatgcataagaaaaactgcgttgtatcatgacattcaattggagcatgtagaagacaataaagatagtgtagcgtcgctaccgtacaagtagtcaatcaaagagaacgtagtagattgttggctacatttaattggacagatatagctgagggtgttagaaatgagttcattaaaatatgtgatatcaacggaacatatttatataattatactattgctgttagtataattattgattccacggaagaactaccaacagttactccaattacaacaacatatgaaccttctacatataattatactatcgatgatagcactgttattactactgaagaactacaagtgactcctcatatggatctccatcgatgatacatgtattaaaatactttccgaataagtcttttaaatattgtattaattatgaaaaactatgctatgcgagtatgatgcaaagatgtttaatgatacgatactagattttatctctagcgagagatgtcgttagaatcatttatcataactacgtttaataataattcatcaacgaatatcgataacatgtgtcatttatacgttaaagtctgtccgtcttctctattgtttagactgtttgtagaatgctgtgatataaacaaactagtagaaggtacgactccgttacactgttatctaatgaatgaaggatttgaatcatctgttttaaaaaacctattaaaggagtatgtcatgaatacgtttaatgttcatgacatccattacacaaatatttaactcatgatgaagttgagaatgatatgctttctgatagtatagatagctttagctaatataaaaatatattaatccactatatattctagacttgatttaaaaccgataaactactactacgtactgtataagttgttaaaaaaaggagcagaccctaattatgtagatgatagaggtaatacttttcttcattacttctgcatctatatgtccacttatgagaaaacgtcatttaataagatgcatcgtgaaaagaaatttattaaagagttggtaaaatatgaaaccgaaagtaaataatataggaaatacacctctacataactacgtatctcaatatgatatcactctcattcctcatccacaacccattaaaaaaatggaaattaaagccctctattagcataaacggctacaggtctacctttacaatggcctctccttgtgcccagttcagaccctgtcattgccacgctactaaggactccctgaataccgtggccgacgtcagacattgtctgactgaatacatcctgtgggtttctcatagatggacccatagagaaagcgcagggtctctctacaggcttctcatctctttcagaactgatgcaacggagctctttggtggtgagttgaaggattcacttccgtgggacaatatcgacaattgcgtggagatcattaaatgtttcatcagaaatgactccatgaaaaccgccgaagaacttcgtgcaatcattggactttgtactcaatcagctatcgtctctggaagagtcttcaacgataagtatatcgacatactacttatgctgcgaaagattctgaacgagaacgactatctcaccctcttggatcatatccgcactgctaaatactaaatctccttcatgctctctcactacactttttatcatcttatgaggaatgattgccttcatcatttttcgtgaaataggaataattagcaccagaatagctatggattgcacatgtattctatgtcgtctactggatgaagatgtgacgtacaaaaaaataaaactagaaattgaaacgtgtcacaacttatcaaaacatatagatagacgaggaaacaatgcgctacattgttacgtcttcaataaatgcgatacagacattaagattgttcgactgttactctctcgcggagtcgagagactttgtagaaacaacgaaggattaactccgctaggagcatacagtaagcatagatacgtaaaatctcaaattgtgcatctactgatatccagctattcgaattcctctaacgaactcaagtcgaatataaatgatttcgatctgtattcgtatatgtcttcggataatatcgacttacgtctgctaaaatacctaattgtggataaacggatacgtccgtccaagaatacgaattatgcaatcaatggtctcggattggtggatatatacgtaacgacgcctaatccgagaccagaagtattgctatggcttcttaaatcagaatgttacagcaccggttacgtatttcgtacctgtatgtacgacagtgatatgtgtaagaactctcttcattactatatatcgtctcatagagaatctcaatctctatccaaggatgtaattaaatgtttgatcaataacaatgtttccatccatggcagagacgaaggaggatctttacccatccaatactactggtcttgctcaaccatagatatagagattgttaaattattaataaaggatgtggacacgtgtagagtatacgacgtcagccctatattagaggcggattatctaaacaagcgatttagagtaaccccatataatgtagacatggaaatcgttaatcttcttattgagagacgtcatactcttgtcgacgtaatgcgtagtattacttcttacgattccagagactataaccactacatcatcgataacattctaaagagatttagacaacaggatgaatccatcgtacaagccatgttgataaactacttacattacggcgatatggtcgttcgatgcatgttagataacggacaacaactatcctctgcacgactactttgttaataataatctcgtcgatgtaaacgtcgtaaggtttatcgtggaaaataatggacacatggctgtaaatcacgtatcgaacaatggccgtctatgtatgtacggtctgatattatcgagatttaataattgcgggtatcactgttatgaaaccatactaatagatgtatttgatatactaagcaagtacatggataatatagatatgatcgataatgagaataaaactctactatattacgcggtcgatgtcaataatatacaatttgcaaagcggttattggaatatggagcgagtgttacaacatcacgctcgataatcaatacggccatccagaaaagtagttacagaagagaaaacaaaacgaggatagttgatttattacttagctaccatcccactctagagactatgattgacgcatttaatagagatatacgctatctatatcctgaaccattattcgcctgtatcagatacgccttaatcctagatgatgattttccttctaaagtaagtatgatatctccggtcgtcataaggaactaaagcgctatagagtagacattaatagaatgaagaatgcctacatatcaggcgtctccatgtttgatatattatttaaacgaagcaaacgccacagattgagatacgcaaagaatccgacatcaaatggtacaaaaaagaactaacgtccatcattacagaaactgtaaagaacaatgagaggatcgactccatagtggacaacattaatacagacgataacttgatttcgaaattacccatggagatactttattactccattaaataatttatcatggagcgataatgtcctgtttcatttgtttccatgacatattacaaaatcgattccgtccaagatgataaaaacatttaccggcatcataaacacggagtttattttatatgtctcgcataaacattactaaaaaaatatattgttctgtttttctttcacatctttaattatgaaaaagtaaatcattatgagatggacgagattgtacgcatcgttcgcgacagtatgtggtacatacctaacgtatttatggacgacggtaagaatgaaggtcacgtttctgtcaacaatgtttgtcatatgtattttacgttctttgatgtggatacatcgtctcatctgtttaagctagttattaaacactgcgatctgaataaacgaggtaactctccattacattgctatacgatgaatacacgatttaatccatctgtattaaagatattgttacaccacggcatgcgtaactttgatagcaaggatgaaaaaggacatattcctctacaccactatctgattcattcactatcaatcgataacaagatctttgatatactaacggacaccattgatgactttagtaaatcatccgatctattgctgtgttatcttagatataaattcaatgggagcttaaactattacgttctgtacaaaggatccgaccctaattgcgtcgacgaggatggactcacttctcttcattactactgtaaacacatatccacgttctacaaaagcaattattacaagttaagtcacactaagatgcgagccgagaagcgattcatctacgcgataatagattatggagcaaacattaacgcggttacacacttaccttcaacagtataccaaacatagtcctcgtgtggtgtatgctcttttatctcgaggagccgatacgaggatacgtaataatcttgattgtacacccatcatggaacgattgtgcaacaggtcatattctcataatgttactcaattggcacgaacaaaaggaagaaggacaacatctactttatctattcataaaacataatcaaggatacactctcaatatactacggtatctactagataggttcgacattcagaaagacgaatactataataccgcctttcaaaattgtaacaacaatgttgcctcatacatcggatacgacatcaaccttccgactaaagacggtattcgacttggtgtttgaaaacagaaacatcatatacaaggcggatgttgtgaatgacatcatccaccacagactgaaagtatctctacctatgattaaatcgttgttctacaagatgtctctccctacgacgattactacgtaaaaaagatactagcctactgcctattaagggacgagtcattcgcggaactacatagtaaattctgtttaaacgaggactataaaagtgtatttatgaaaaatatatcattcgataagatagattccatcatcgtgacataagtcgccttaaagagattcgaatctccgacaccgacctgtatacggtatcacagctatcttaaagccatacattcagacagtcacatttcatttcccatgtacgacgatctcaaacccgtacccagaaatacctttaactatatcgatgtggaaattaatctgtatcccgtcaacgacacatcgtgtactcggacgaccactaccggtctcagcgaatccatctcaacgtcggaactaactattactatgaatcataaagactgtaatcccgtctttcgtgatggatacttctccgttcttaataaggtagcaacttcaggattctttacaggagaaaggtgtgcactctgaatttcgagattaaatgcaataacaaagattcttcctccaaacagttaacgaaagcaaagaatgatactatcatgccgcattcggagacagtaactctagcgtcgacatctatatactatatagtaataccaatactcaagactacgaaactgatacaatctcttatcatgtgggtaatgtagccatatgcccggtagttgcgatatacataaactgatcactaattccaaacccacccgctttttatagtaagtttttcacccataaatacaataattaatttctcgtaaaagtagaaaatatattctaatttattgcacggtaaggaagtagaatcataaagaacagtactcaatcaatagcaatcatgaaacaatatatcgtactggcatgcatgtgcctgccagtcttcagcaatcatcctcatcgtgtacggaagaagaaaacaaacatcatatgggaatcgatgttattatcaaagtcacaaagcaagaccaaacaccgaccgatgataagatttgccaatccgtaacggaaattacagagtccgagtcagatccagatcccgaggtggaatcagtcgaggatgtagatcctcctaccacttattactccatcatcggtggaggtctgagaatgaactttggattcaccaaatgtcctcagattaaatccatctcagaatccgctgatggaaagactgtgaggtgtctatcgacatcagatgtagcgaagaagagaaagacagcgacatcaagacccatccagtactcgggtctaacatctctcataagaaagtgagttacgaagatatcatcggttcaacgatcgtcgatacaaaatgtgtcaagaatctagagtttagcgttcgtatcggagacatgtgcaaggaatcatctgaacttgaggtcaagtatgtcgacggatcggcatctgaaggtgcaaccgatgatacttcactcatcgattcaacaaaactcaaagcgtgtgtctgaatcgataactctattcatctgaaattggatgagtagggttaatcgaacgattcaggcacaccacgaattaaaaaagtgtaccggacactatattccggtttgcaaaacaaaaagttacctctcgcgacttcttctttttctgtctcaatagtgtgatacgattatgacactattcctattcctatttcctttcagggtatcacaaaaatattaaacctctttctgatggtctcataaaaaaagttttacaaaaatatttttttattctctttctctctttgatggtctcataaaaaaagttttacaaaaatatttttattctctttctctctttgatggtctcataaaaaaagttttacaaaaatatttttattctctttctctctttgatggtctcataaaaaaagttttacaaaaatatttttattctctttctctctttgatggtctcataaaaaaagttttacaaaaatatttttattctctttctctctttgatggtctcataaaaaaagttttacaaaaatatttttattctctttctctctttgatggtctcataaaaaatattaaacctctttctgatggtgtcactaaaatatttttattctcattctcattttctctttctctcttcaatggagtcataaaatatttttattctctttctctcttcgatggtctcacaaaaatattaaacctctttctgatggtgtcactaaaatatttttattctcattctcattttctctttctctcttcaatggagtcataaaatatttttattctctttctctcttcgatggtctcacaaaaatattaaacctctttctgatggagtcgtaaaaaagttttatctctttctctcttcgatggtctcactaaaatattttttattctctttctgatgcatcaactatttcttaaacaataacgtccaacaacatatactcgtcgagcttatcaacatcccctatgcccatctaggttaccagacaattgtatatcataaaataatgtttataatttacacgttaaaatcatataataaaacgtagatcgtataatattttttggtatataaatgatctagtaaaatccatgtaggggatactgctcacattttttctttggtacaaaatttcacacaagtttttatacagacaaattcttgtccatatattttaaaacattgacttttgtactaagaaaaatatctagactaactatctctttctctttctctcttcgatggtctcacaaaaatattaaacctctttctgatggagtcgtaaaaaagttttatctctttctc

SEQ ID NO: 2 - DNA, 138203 bp, Artificial Sequence
  Synthetic Polynucleotide
ccggcgaagccgcggatccgctgttccggcgaaggcaggacagacattttttccagcccataaattaaaaagaatcaacagaaaattatcatgatgataaaaacttttaggattgtatttagttgaacgtttcgtcaataaatcaacctcaaattttttcacatgtaatttcttgttctttttaatttatgggctggaaaaaatgtctgtcctgccttcgccggaacagcggatccgcggcttcgccggggcggcggccggctcccgcggcggctgagccgcgctgccgcgagaacgcggaccaggagttcctgcgggaggagctacggcagaggctggaactgctgaatgctttcgaggacgggcgtccgcgggaacgcgactccgcggaggcggcaccccgcagccgcgagacctcgctctggagtcagggagtcagggagtcgggagtcagggagtcgggagtcagggagtcgggagtcagggagtcgggagtcagggagtcgggagtcagggagtcgggagtcagggagtcgggagtcagggagtcgggagtcagggagtcgggagtcagggagtcgggagtcagggagtcgggagtcagggagtcgggagtcagggagtcgggagtcagggagtcgggagtcagggagtcgggagtcagggagtcgggagtcagggagtcgggagtcagggaaacagaagtcaagtagtcgggtagacaggagtcaggtggtcgggtgaccgcgccgtccgagtcccgcaaaaagtttttagactctgagagaggccgacctgcctccaacggttccgcggaaaagtttttataaaaagttttcgggagaggccgactgccttccaacggttcctcctctcgcgtgccgcgggcggccgctctcccgcgacggtcccgccaacgcgtttacaaagttttaaaagttttcgagagaggccgacctgtcttccaacggttgcgcgaaaaggttctgcggaggtttggaagagccgcccgccctccgacatcctccgaaaagttttcgcaaaaagtttttaaaggtttcgcgaggagttttcgagggaggcgacctgcctccgaggttccgcgtaaacgtttttacaaagcgtcggaggtgggggcgacctgcccttcctctcctccgaaaagctcttgagagtgtgggagaggcggccggccttcgcggtcgcgcgaaaaggttctgcgggagttcgcgggagctgacccgccctccgcgcccctccgaaaagtttttgcacgaagtcttttggcgttctcgagaggacgcctaccccgacggtaacgcggaacgtctcgggaggtcggcctctccgctcccgcggtcgcgggcggcggcccgtctccggaggttccgcgaaaagttttataaaaagttttgagggaggtaccgacctcctaaagttttacagagagttctcgcaaaagttttgggaggtcgacctgacctcctaaagttatcgaagagttctcgcgaagagttctcgcaaagagtttgagaggccgacctgcctccaacggttccgcggaaaagttttataagagttttgagagaggtcgacctaccttccaacggttccgcggaaaagttttataagagttttgagagaggtcgacctactctccgaggttccgcggaaagttttataaaaagtttttacaaagtttttgagggaggtcgacaccctccggatcctccgcctcgcgtgccgcgggcggcctccaagagttttacggaacgttctggagaggagaggccgacctcccaaagattttgcggaacgttttggagaggaggactggcctcgaaaagattttacaaagagtttggagggaggactggcctccaacggttccgcgaaaaagttttgcaagagtttggagagaggtcgaccaccctccgaggttccgcgaaagtgtttgcggagagtccgagagaggcagacactgcctgcgaaaagttttcgcggacggttgagcgggtcaccgacctccgacagtttacaaacgttttacggagagttagagaggcagcagaccgacctccgaacagtttagttttacaaagttttggagggtgaactgtcatcgggaaagttttacgaagagttttgggagaggccgacggttagccgagcgagcgcgcgagcgagtttacgttctctcgctcgtgtgcgcgttaactcgcactggttccctctctaactcggagtgggcgagcgagtggttgactcgtcctccgctctcactctgagtggtgataactgttaaccattaactcgtcctccactctctcactctctcactctgagtgaggattgacttgttaactcgtcctccactctctcgctctctcgctctgagtgagtgaggattaactgttcaactcgtcaactcgtcctctgcctctcatccaagactgagtgggtagttgactgctcttgttctcttactccgaggggtgattgagttagcaacagctactcgttctcttgttctctcacaccgagtgagcgagtgagcaacgttacttgttctctcacaccgagtgagcgagtgagcaacggttaactcgttctctcgttctctcgttctattattccgaggagtggcgagtgaggtaacggttactgttacttgttctctgttcccttcctcggtgagcggtgcgtcaacttgttctcgtgagtgagtacggtcacttgttctctcgttctctacctcgaggagtgagtcaacttgttctcgtgagtgagttgaccgtaaccgttcccttacctcaagtgagtggcggtcgcttgttctcgtgagtgggttaaccgcgttcccttaccggagtgagcgggcgggcgataaaaataatcaattgactgattcgctcgtgagcgagcgaagggcggcggacaagggcgcgggatgctggtctaatctactaaggccgattacaaaaacggatgggagaccgggagggagagggtcacagctccgagcggtgcatccgcgccagctggcggcgccactcggccgcgggccgcgcggccgcccaggccgcgttgtagccgcccgccaccgcgacgcaggtcagctcgaactccggcccgagcgcgcgcacgtcgtagatgtgcacggtcgcgacgttcagcagcagcgcgcccttgcgcagcgaggcgaaggtcgcgtgcatgccggcggcgagcgggtacaccggcgagagcgtcccgccgccgtgcgcgaccaccgccatgtgccgcccgtcgccgccgacggtcaggcaggtcaccgaggcggagccgttcgcgcggacggggcccgcctccacgagggcggccggcagcggcggcgccgcggggcggaagagcccgccgaggaggaagcccagcgccaccagcgcgagcgcgccgagcagcctgcgcggcgaggggtgcatgcttgttggctgcggtgttggcgtctggcgggtggaaggcgggtgtggggtgtccgcggctgcggcgggagggtctcgactgctaggcggtcctttttcactttgctccgtggcgcctggtccggggcaagggctgcggcgggcgcccgggcgggcgggccgctaccccgccgcgcggcccgcggccgccagcgccgcggccagccgccgccaccgcgggcccgccgcgcgcagcagccccgccgccgagcgccccgcgccgccgcgggcgcgcgccgaggccgcggccccgcgccgcgccagcagcagcggcagccgcgcgtccagcgggccgccgcggcgcagcgccgcgcgcagcagcgccgccagcggcagccgccccgccgcgtccgggcccgccgcgcgcgcgcccgccgccagcagcgcgcgcaccagcgccggcgaggggcgccgcgcgcggaccaggtgctccacgagcagggtggtgagcaaggattctcgagaagtaggagtcatgtgtgacgacaaggagagacgttatattaggcgcgtcctacttcactttgaagatggtgtaaagtgttaaaacttgaacaccgttcactccaccactgccgttaccgtgtcctgccccaaaagcaaccacagtgctttttccaccacctgttccaaatccgttccaaaagctcccatccattgttgttagaactttcagatgtttctctaggttgtttagttccactgcaagtttcgaccattatcgttactggacatgctgttggtaatgagtttaataaccaatcataaaaatagttataatttgttataaagctaataaagtagcaaacactttaatgttatattttgcctaaccctccgttaacaccaccattaacaccaccacttaagcttttactaccaccactaccacctccaacacacattcttttctctaaaggtccccaaattccacctcctgaacttggacgttttacagcacctccgggtgtacttgcgtaccctttagaagttccactgtgactgtagatatgatactgtccttctccaggcatgattaaagtgtgttgtaattagtgttatctacgcaactgtgcgagactctcgaataaaaagaagctacattttacaattttgattagctgatgtaccacgctgtatcgcggccaccacaagcacccgatccagtagaaccaaatccagagtcgccgcggtcagtgttgtccaagcagttaacctcttgaactgctgggcacgatatgcgttcgcatattagctgagctatcctgtctcccttcttaacctcaaagtcactgtttccaaagttaaacagcaccactccgacgttgcctcggtagtcttcgtcgatcacgccagcgcccacgtcgataaagtgtttgactgcaaggccagaacgtggtgctatgcgtccgtagcaaccagaagggggctttatcagaaggtcagtaaatactacgcgactgcaatgcgaagggatgacacagtcgtatgcactacataggtctaatcctgcggcaccaggagatcctctggctggtatagtggcgttttggctgaggcgaacaacctgaagagtttccgtgtggcagaactccatggctagggtggcgagcggccgatcgactacggggtgtacaatttacactttctccagaaaaatcaggggcgggtcagcatggcgcggcgcaagtccagcagcgagtcgtacgacaggaagcacaggatggaggtcacgatctccggcggcagggcgcacgggcacatgaggccggcgatctgctcggccagcgagacgcgcagccgcatcatgcagatcttgccgaagagcgccgtcccgtagatggggaactcggccgcgcgctccaaaaaggcgttctgcacgaagagcgccttcgcgtcgtccgacgcgcgcagcacgtccaacagcgtcgcgtccgtgtggcagcgcaccgcgcgcatgcttgcgatctcctgctcgcacgcgcggatcacggtcgcgtagtccgccagcgcgcgctccgccagcatgcgcgcgccctcgccgcgcagcgccagctcctgcacgcacagcagcgcggcctccgagcgtcggaacacgtggccccattgctcggatgtgatcagcgcgcgcgcgagcagctccgtcggcggccggcgcgcgagcacggccgccgtcgcgcgcacgttgttgcggcgcagcatctccgaaaccgcgcataggcccgaggccgacatgtgctcgagctccgcgcccatgcgcaccagccggcagcaggcgccgtggctgaacaccgccgcgcggtgcagcgcggtctgcaggttgttgttgcgcaggttcaggtccagcccgcgctcgagcacgaagtccacgacgccgcgctcgcagctcccgtaggtcgccatgtagtgcagcatggtgttcccacacgcgtctacggcggccgggtccacgcctaggcccgtgagcgtgcgcaccatgccctcggagatcttggccgtgcgcgcgaggtggtgcagcgttgtgcgcccgtacgcgtccacgacgcacgcgtccgcgcccgcgcgcagcatcatgtccacgagcgcggcggagacgccgccggagcacagcagcgccgccagcggcgtcaagccgttgcagtcgcaggcgtttgggttcgcgccgcgctcgagcagcagccgcagcacgtcctcgcggatccactggttcttggcgtacacgtgcagcggcgttacgccgtaggtgttgccctcgttcacgcgcgcgcccgcgtccagcagcagccgcgcgacctcgagctcggcgccgtcggggccgcagaaagccaggaaggaggagagcacgctgtcgcagacaacgacgctggcgtcgcagaccacgtccgcgcccgcctccagcatgagcgcgaccacctccggccgcacgccgtcgtactgcacgtaggcgtgcagcggcgtgcggccgcaggagtccttggctttcacgtccgcaccggcctccagcagcacgcgcacgatctccgcgcactgctcgtgccgcgcgaagtgcacgcagaggtgcagcggcgtgcgcccgtgctcgccgcggaagttcacgtctgcgtcggtggctacgagcgcgcggaccgtttcgaggtccacctgcccggactccaggtagcggaagagcaggtccgcgtgcgggaccacgacggactcccgcgagagcatggcggcgtttacaaatattgaaatcttttttcactcatctttatgggcgctgaacgcgcaataagggtgagagtaaaaaacttctacaaaaagcgtacaaaaggtacaaaaggtaaaaaaggcggggcggggacgggctggggtgctgcgagctgaattggcctctacacagggacgccctcgccggagccggtgagccggtagccggcgccggcgatcatggtcaagcgctgcacgagctcgttgcgcttgacgccggcctctgaaacgcacaccatgtggtggatgtaccgctcgatgcactcgcagcgcgggagagtggagtcaagatcggatgcgagttgcagaatgtcatcccagagctcggagaacttgctgtacagttctcggaggtctctctccattcgagccgtaagagagtcaggatgcggtgttccttcgggagtctgagcgaacaccgcgaacaggctggttatgccgtgttctagaatagagtggttccgcgttaatgccgcagacaagggtcgtcgtccgcgcaacgactggcggcagagcgctgtttgtgccgcaccgcccattcctctggcgatcgcatccaccgacgcagtgatcatctgcgcgccgacgtcattgtagcgcgcgttaaactcagtaatcatgattacgagattgcagatttcatagtagcacttttccaagtcgacgcgcagtttcacgatctggttgacaatcttgcacgcctttcgccgcgtctccgccacgttggcgactcggacttgcgcttcctggtcgatggacggcggaaacacttcaaacccaaggtcgcacagttcagcggtggggactagcgtcacgatgatgtactccgcatcgccacccacttgcggcaggaagaacaccgaccgcgcggcgggaacgaccagaacgtcgccttcctgcatgttggtttttagaaacttagtgttgttcacggagatgccggccatgccctcgtttttgacacatattatggtgacgtacgcggcgaccgtgggggccatgtggtggcgcatgtaccactcgtcgtgcttgagtttcagaccgtgagattcgccaacctcgaagtgcatgttggcgtctctgacgtagcgcgagaactcgctgcgacagattcgcgcgggcgcccggtggaacgtcgactcgaagagactgatggctgtccattcgcccacatgagtgaccaccgaagaagtgttttcgatccgagtctcgaacaccgagtccacgagcaccggacagttggttccgggcaccgtcagcaccaagggccgcgcctccacgggggcgacggacgaagccacggagtcggtgtccccgtacccgtagtcgtcgtcggagtcgccgcctccgtcggccccgtcgcgcggcctccgcagcggcatgcagccggcggtgggaacgcactggtttcggccacggccgaagcggccaaacagtctcgccagggctgacatccttggacggccacaccaaaaccaaaaaaacatattttatcagttatttgtcgattttcaccggctcaccgagggcaggacctcctggatcccggacacccccgccaggcagcgggccgcgcgctcgcgcacccaaaagcggtcgtagccgtgccggagcacgaaggccgccgtggcgtggcagtccacgcgctcgatgaagccgtggacggcgcggcgcgcgtagctcgccgcgaaggcgcggaccaccgccgagcagcgccccgagggcgagtcgtccgtctccagcgccagcggcatgctcgcgatgcgcgacatcaggttggaggtctgcgggatgttgagctcgcgcgtggcggtcatctgcgcctcgagcccggccttgagcacctcgtcgcagcggccccactccagcgcgcagaccacgcggatctcgtaccccttgagccgcagcgcggtctcgatgtccacggaggtgagcaccgcgctgaagcgcaggcgctcttcgtccgcggggtcgaagagcacggggatcttaacctccgcgctgcgcgtgacctcgcagagcgcgatcgcgagcagcccgcgcgtgagcttgctcaccatgcgcggcttgcccacggggtacagctggctcgcgacctcgcgcagcgggtacgccagtcggaagcagcgcgcgtccgcgggcaccgggctcgcgcccgtctcctcgaggaagagcgcggcctcaaccatgttcagcgcggagaagtgcaccgggcaggcggcgcagccgcgcgcggcgttcgcgagcaccatctcgcgcagcccgcggaaggccgccatgtcgcaggaggggaagatgcgcgcgagcgcggcctggtgcgcgagcgccgcgtccgagagcgcctgcgcggccgcggcggcggcctcctcggcggcggccgcgctctcgtccgcggagaccacgtcttcgggcacgtccacgcagacgccgccccagaactcgcagtactcggagaagagcgtcgcgggcgcaaagcgcgcgaggtccacgaaggcgacgcggttgccgagcctggagagcagcgtgttctccgagatgcgcgtccagcccttgccggcgagctccatgacctgccgcgtgtcgaagagggagctgtagaagccgtacacggtgatgttttccttgcacgtcgtcagccacatgaggaagtcgcgcaccaccagcttcgcgcagtctccggagaacacggggccggcgttcgtcgcgatggagttcaggcgcacggtgccgtcactgccgaagcggtacacgaaccaggcggccacgctgttgccagagggcgtgtgaacgtgtggctgcgcccaggagtcggcgctcgcggcggtgcgcacgtcgtgcgagagcacctcggtgtcggggcgcgagtaggtgctggggtctttgatccagatggcgtagctgcccacgcagcacacgttcatgaggtcgagcagcgtctgccggcgcagcggcgtgccgagccggcgcacggcgtcgtgcgagaccatgcgcaggtcgtagaggcccacgtccgagagccactggttgagctcgtccatggacagggcgtcgcgggggggcgggctgtcttcgaaggcggcgcggagctcgggctccgtctccgcgcgctgccgcaggatgtccaggaaggggctggaggagtcggggatgtagcagtcggggtcgtgcctggacactatagcgaaccgctgcgtcgcgggcggcggggctagcgcgtcggcgcgtgcgtcgatgaaggtgcacgatatacgcacggacttgagcgaggggaggacgactgcggcggcgcgcgcgccctccgcgtcgaagatcatcgtctttccgtccctcgcctttgcgagcgcgtattctccaggcacgaggtccgtcggcggcggctcgtcccaggcctgccggtcagggacgccgccgcacacctttccccagaaccccagcatcctccaaaatacctataaggacggccaatagcggggcttgcgggcgttcggaccttccgcgctttaattttaatttattggcttgcagaactccgagcgccagtcccgctcgaagaccgcggacaggtccttgacgatgtcgcccttctcggcgttcacgctcacgaaggcgtggtagcggtagtgcgtgccgtcgaggttggcgaccgtgaggtgcgcgaaggtgtcgtccacgatgagcagcttagtgttgttcgcggcgtcgtcccggccgggtaccacgaacttgcgcacggacatgtccacgctgccgacgccaaagtcgtcgaggctgcgcgcggccgagaccgaaagcgggtccgcgttcttccactcggtaatgatcacgcgcacgcgcacgccgcggttgatggccgcgcgcagcagcgcgtcaatgatctgcggccagtactccacggcgctggcgtgcttgatcaccggcaccatcgagagcagcgagaggtcgatgctgttcttggcgttctcgatgcggtgcagcacgaggtcctcgtcgagcgtgcggtagaagcctaggaagcgctccggcgagtccgagaagaatacgccgcccccggagtggtcgaggtggaagttcgtggccgtgggcgtgacgatggcgcagcagagccgcgtgaacggcaccttcggctccacgatcatggagtagaaggtgttgtagcggttcatgaggtcccaggccaggtgcttgttggtggagtagagcccgaggttcttgatggtggacacggacccgcccgtgagcgaggcgcttcccacgtaccagtgcccggcgtccgagagccagaagctgccgagaaggttgccgacgccctccttggtggacaccttgaccttgtagtagttgacgcccgcctcgcgcagctcgtccgcgtccttgtccttgctctgcacgtccacgagcagcgtgacgtctacgccctccttggcgagcgtgcagagcttgtccttgacgtcgacgccctccttggtggagctcaggttgcagcagaagctgcagatgtacaagaacttcttcgcggactcggcgatagcggtgaagcagtcgagggtgctcatgttgccctgcgccaaagacgccacctctgcgggcagcgtctccacgacgcggcagtcggcgcccagggggatggaggagaacggccacatttatttatctcacaaaaataatagggcttcagggaaagtcttttagcaggcgggcgagttcttcgagttcgcttaggagttcttccatttcttcggaagtcagcaactggagctcggacttgatttgaatatcttcgaggaaaccgtctagcatgttcgccatgtcttccggggagcactgcgccacatcttcggggacaggatcgggtgtgggcattaggtctccgcttacttgaacgtcgtccatcatcctgtcgatgaggtcttcgacttctagacggggtccgtagatcagcatatttggtgatggaggtagtttaaggtgcgagagttagtgttatacgaccgccaacgtgtgtttatcgcgcgtacattttcaataattaacaaactccccttcctgcgcctgctcgagaagcagctcgtccagctcctcctgtcggcgcgcggccacgcgtctttccgcgaagagtaccatcagctccagccccacgccgcacagacccaggacgccgaacaccaccgccgccgagatcgacagacccagcagcaccgacatcctcacgcgggcatccggctatttaatcgttctggaaacgtattaatatgggcgtcgtcatgtgcgggtgtctgtttgtgtgggcgggctggatcgcgcgccgcgtgcgcggcctctgcgcggcgctgcgccagagggtgtcgcgcgacaagggctacgtggccgtcatccagacctgcgacgacgactacttcacagaggaggagttcgacgacggcaagcaggtggtcgcgctcctgcgcgacgtctcgcgcgtggttgccgcgcccgcgggcgtgacggaataagttaggataaggagtcgaggggagaaaaacagcggtcacactataaactcgcgcgaggccgattttgacgtgctcatgtctggaagctccgctttctgcagcgcggagcggcacacgaagcacacttccgtgttggtgggagttatgcagtggacgtggtagccgtgcccgcacaccatgacttggaacggacacgcgccgggacaggccgcgtttatgcatccttccggcgagcgcttgttgcagatgtagcacacgtctgagcacgccagcgtgcaggacacggccagcttccactgcttaaccttaacgggcatggctagttgaacacgaccatgggcgagtcgcgagcctcgagtcgggggttcagggcaaaccgtttcacgccgtcaacggttcttctctttgcaattttctctctgcacaggctcgtcagcgtcatctcggccaggcgcgcgtcgttgcctaggtgccgcgcggcgtcctcgaccgtcacgcccgtcttgccggcctcgtccatgagcacaatgcataccaggtgcgcgctagagcatatgacctcctgctcgcgcccgccggcagcggggatggttagctccgcgcgcccgaaggccgccagcggcgccacgtcgtaggcagtgtctgctcgggcgagcgccgactccacggcaccgcggagcgactccggcggcgtcagcgcggccagcggcaccggcgtgggcacggtgtacacgttcacgggcatgagcaccatctccgggtcgtggtggccgctctcttcgccgtcgtgctccatgggctgcggcggcggcagcagcgggagcagcagccgtccggacatgagccggcgcacaaggtcgttgagcgcggacgaggccatcggcgggtacagctccatggccagcttcagcgataggtgcttctcgaggttgacgccggtgtagacgctcttcacgatgcgcgcgaaggccacgcgcgcgaaggccgccagctcctcgcgcggcaggcgctcgatgtaggagagcagcatgtcggtgtcgcacggcggcgccgcgaccaccgcgccgtagagcgccttgcccgagagcttttccagcgcccttgcgtgcaggccgtgggtcttgagcacgtccacgtagttcacgtacaggcagagcgcgcgatcgaggttgctctccgcgacgtgcgtctcgatgcactccacgatgagcgggcccatgcggtccttgatgaggtctatgagcccgccgtaggcgactcgcgcgctcatgaggcacgtgcggcagtacgccatcaggccctcgaggtccgcggctatcacgtcctcgaccacgttcgccacgacgcgctgccagagccgcaccttgctcacgttctggtgccgcaccatgtccacgagctcgtcgtacgagccgccgggctcgtgcgcgcgatcgacgatgcacctcgccatggtgcggctctggcgcatgagctcgttcgtgaagcgcacgcacgcgtcctcggagaagagcgcgctcaggcaggagtagcagcggtccgcgacgaggtgcgggaagcggcactccacgacgccgcggccgatccgcagcacgcactcgccgtacatctcgtccatggcctcgcgcagacagtcgtccagcacgtccgcgttgtgcgcccactggatcacgcagaggtagggctcgatgttctcgcgcgcgttttccacctcctgcaccatgtactcgagcacggtcatgtcctcgtggatgtcggtgcccagcatgcgcccgggcggcagccagctcttgcgcgcgatcgcctctcgcaggcacgccaccgccgtgaaggtgttgacgcggagcttggtcagcagccgccgcagtcgggagatgtgtgccacggagaggtccatctccatggcctgggcgatgaggcgcgtgagttcctcctccatggcggcggctccgcgggcagatatacgcgaacaacggtaagccgtgctatttcatttttggacaaaaagctagtcgtcgacgcgcatgttgtcgaggttccggcacagcgagagcacgtcgtcgcgcgcgcgcctccggcgcagttgattgttcgcgcgccgcgcgtccgcgagcgcctgtctgtacatcgcggagtccgcgtacccgtgcagcggcgagcgccgagcgccgggcctcgggctcgcgcggcgcgggagcggcgttggcgcgcgcctcgagcgccgcgcgaagtgcgcctgcatggccagcaggcaaccgaacggcaccatgtatcggtccatgaggcactggctggccgcggacggctcgcgcgggtgcatcacgccgccgcccacgtcctccatgacgtcgcgcagcacgcagcgcagcatggtctccatgccgtccacgggcttgaaccgcaccggggaggcgtcgacgtagaagccgtcggccacgaagtagagcgcgtccagcccgccgagtttctcgccgagaccgacgaagagctcgtccacgtgccagtccaccaccgaggccttgaagagcaccacgtgccggatgtcgtgcgagcgcgcgagctcccaggtgtcctcgccgatgttgctggcgtcgatgcggcctgtcatgcgcacgctcacgcacggcgtcatcccgttcttgtagcagaactggcgcgcgagctcctcctggcgtacgatgtcgaccatgctctccatgaaggaggtggagagcagcatcgcgccgcgcgcggcgcgggtcgcgttttcgtccacctccacttccatcccgccgccgatcctaatcatctatcgtatttaaattttcggcggagcagacacgcggctgctcgctgcgcgatcgcttcagccgcggcggcgtcacgcacgcgttgcggcggccggcacgcacggacgaccgccggggctcttcgctgagcgagcgccgcggccgcgtgacgcgacagtcgcaggtgggttgccgggagtcgctcgcgcgccttcttcgcatttcgccggaacgccgcgtttatgtaggggattatattttcaacgtaactaaatggacgggggcgtgcacaaacggcctttcatcgtgaacgtggatggcatgggcaaggtgctcgtgctccggtacttgcggatgtgcgaggtgcccgaggccaagtgcgagggctcgcgcgcgtcctgcgtgctcaagatggaccctccccgctcacccagctgcgagcgcaggccgtctctcccgccgtcccccccatgccccatgcgcacgcctcccgggtcgccgctccaggctcccttgatgcgcacgcagatgctccaggggctgttcgacgctgccaaaaacaacggcgagcagatgtgccgccgccagtaacctaggctgcgcagtacgaaagttagtgcgtgatcacgttttttgcaatgtcgatcacgccgtgcgtgcccgtcttgcgctcgcgctccaccacgctagtcacgggccgcgcgtccgagactagcgaccccagcatcgagcgcacggcgccctccgcggcggggtggcgcgtcagcagcaggaacatcacgatgtgcgcggagacgccgcgccggctcagatcgtgcacggcgtcgccgtccatgagcacggtgttcgagaagtacgtgaacagagtgttgtctcgcaccaggaaggccgagttcgagacgctctcgaagtccacgatctcgtcgtcctgcacgcccatgtccaacagcgtctgcacgagcgcgggctcgtccaggaacaccactgcgcgcgcgaacccgcagtccagcgcgcgcgcgtccgcctccaacacgcgcgaggcgccgccctccggcggcaggaaggcgcagggcagcggcgtgcgtccgtccgccggcgcctccccgagctcctcgagcgcgaaggccagcagcgtctccatgcgcgcgcgcgccttgtcgaagttgtccgcgaggtcgcggatgcggtctgtctgcgagaacatcttcagcatcgccatgagctgcacgaaggggtgcagcacgtatatgttgtccacgagcagcgtgggcagcgcgcgcagcgtggcctgccgcacgttgaagctgtccaggatgtgcccgccctcctcgtcctgcagcaccacgtagttcttcaggtagggcacgcgcagcagcacggtctgccgccccgtgacgaagtatatcaggaaggcgaggttgatcaggaacgggcgcgcgttcgtctgcaccatgtcgatgtcgccgtactctatctcggggttcagcaggtgcagggcgtacgagccgtagcacacgcaccgcttgttgtgtcggcgcaggtgctccttcacgagccgcttgaccacctccaccaggtccgagtgcttgtgccgcgccatcggcgcggcctcctcgggcggcggcagcactgcgtacgagttgagcgcgcggctggcgagcgcgcgcgcgcggggcgcgtccacgcgccgcaccgccgcgttgattgcaggcgtcggcgtcgtgagagagcccagcgtgcgcgtgaactcgctcacgatcacgctctgcagctccagcaccgtcaggatctggcccagcttctccaggcgccgctgcctcgagaagtactcctcgatgcgcgcggcgatctccttctcggagccgcctagcttcttgaagaagcgacgacgactctttacaacaagagagagaaaaagcttcctatcgaagttgaggacgcgggtcatgttgcggcgctgcgcgcgcaggagcacgcagcgctccatggaggggcgcgagccgaggtactcttcgatcacgggtggagccatgacagctattttctgaacccgcgattattgtacagcgcaagccgcgcgcagacctgctggcacagcagcgtcgtgtttcgcatgcacacgcgcgaggactcgatcgtgcgcgcgtccggtgcccaggcgcgcagctccatcagttcctgctcgacgaagtccacgggctccacgaagcgctctgcgcagagtccgtccgtgaacgcgttgacgatctgccgcacgagcactaccacgtccacctgctccacgaggcgcacgcccatggcgacgtgcacgaagaggcagcggaagagcgcgtccatggccatctggtggtccgagcagggcccgaccgcggtcttgcagcccagcgcgaagcgcccgatgccgcggtactgcaccatctccgagggcgagaaggagagccgctccatcttgagcacgggcggcgggcccgccggcagtccgcgcgcgaggtccagcaccggcgtccacccgggcgtgaacatgtccgggatcaggaagagcccgtagctggccatgcgcgcgatgtcgaaggcgtggtccacgaccttgttcacggcgctgtccgcgcggtttacgcgcagcgcctgcaggatcacgtttccggaagcgtgccgcgtgatcgcgaggtccgcggtcgcgtacccgcgcaggcccggcaccgcgtacgcggtcagacacacggccaggcgcgcgctgtgctccgaggagaagatctcctgctcgtagccctcctcgggctcctcgcactcgcgagggcgccgcacgtcctcgaccgagcgcagccgcatctctccctccgacaccagacagccaagcgactccctcaccgccggcgcgagcacctccgtggcgcagagcgcgtcgtgcacgcgcttgagtgtgttcggcttcagcgcgtagccgaagagcagccgcgtcatccgcgagcccgagaacgcgaagcggcgcacgtactcctccgcgagctcggggcggtcgttgatccacgaggtagagaagacgtggtcggaggcgaaggggtctgcaccaaccgcgagcagtgtggacagaggtacggtgtcgaggaagtccacgacgtcggggaagttctggcgcacgcaggcctcggcgacgcgtctggtgtgcacgcacatgtcggtgacgggcacccggtggccggactccacgacggacacgcagacgtcctcggtgacggcgtccacgggcatggtccgcagcagcttgccgagcacgtcgccgaacccgccctcgagcgccttgcgccacacgaaccccgcgtcgaacttcccggggaagtccgcgatcaccgaaagctccgcgtgcgagaggttgtccacgttgaggtaggtggcggcgtccacgaagatgggcccgaaggcgccggtgtcggagacgcggtctctgaggtagtccctggcgtagtggaggtactcccgcacctggccggcgcggatgcgctcgagcgcgaaggccttcatggtctcggagcagagcacggagtgccgcagcccgtccagtgtgcgccgcacgtcgtagacgccgcgcatctgcgcgagcatctcgacggcgtccgccggcgtcgccgccgcgagccccgggttcactggaggtatcctgtgttctgcgagcatgcgcttgaggaaacagaggtccagcggccgcgtggtgtacagcgcggaggccatctcggggcgcgtctcgacgatgtcctcgatcatctcgtccgtgaatgccgcgttgatgttgtgcacgctgcgcgcgttcacgtgcaggaggatgtcgcccacgttgtcggggaatcgctcctcgatgagccggacgtcgtcctccgtgatgttcatgtagggaatacagcggcagagcagcgcgtagtccgcgaactgcgcgatgtagggcgtgtggaactcgatgtgtctggcgaagagcgcgccgcagcgccgccgcgagagctcttcgagcaggtcctcgggcgtgacgtgctgcgggcggaagaggtgcaggtgcgtggggtgctcggcggccacgcgcgcgtacagccgccgcgggaggtgtctggggtgcacgccggcgagcacgagatccatggcctctgaggtagacagtgcggcgaacgcgcgctcggtgccgcccgcggcgacagcggcgccgacaaatctcttgagcagctgcagcatcgcgtgtttgggctttcgcggaaggcgcttattttaatgttattggcggtggccggtgcgagataaaaattagaactgatgccgcagttgttgatgatatgatgattgcgctggccggcgcgagataaaaattagaagctgatgccgcagttgttgatgaggatggtgagtgcgctggagcaagcggtgtggcgcgctagcttcttgctggccccgtcggccacggcaacgacctttccggatatcgtgatggtgcaggtgaagcgcggacagtgatcctctccgccagcacgcgtctcgcagaactccagaggtctgtgtgtcatcatgcagaactcgttgaccgcgctgaccgggttaagacttttgaggcgtatcacggcagactgagtcatgatgtcgatgtcgccgccgaaaagcgtatcgcacccagcctcggtctccatgggctcggtgtcggagttttcgtcctcctcggtgggcgcggagggcgcgcactctacgaaccagcggggcgggtttccgtcctcacagcaaacctcgtccgagtccagcaggcggtacagctggcggtttgcctcgtgtttggatatgccgagctccttcgcgatttgcttggccggcagcttgtcgtcggattttctgagaagctcgaggatcagagacgcgcactcgcaggccattgtggcgatttacggggcgtgcgtttttttaggattttggcttgcctttcttttcgcagaacttgggaggattgaaactcttttggcaatttttgcaggcgtacttgatcaagggcggctcgtccgccgagcgcgtctggatcatcatcggcatggtgttcttgctctggcacgaggggcagggcaggttgaacttctcgtcgagcacgttgaagtacccgctgtagtcgtggtccggcacctcctcgatgtcgtagggcacgcgcgcggccacgcacttgaccgcgaagagcaggtaccgcagcgcgtcgtgctccgcgccgctggtcgcgcggatctgcgcgcacaggtccgcgtagtcctcgttcgcgtccacctccaggctgcgcttgttcttgtacgagagccggttcttggcgtccttcgagtactcgatgccgatgttgtgcgcggggtcaaagttggtctcgtcggtgttcgaggtcttggtgttcacgatgttcttcagcgcgaagcgctgcgcgcagtccagcgcccatcgcgcgatgcgcgcggcctccgccgcgtcggtgtgcttcgccgcgaggtcgcgcagccggtcttcgtccatcgcccgattttaggttgggtatattatctcaattccgctcttccgcgggccgcgggcgcgcgcccgcggcaaattaggcgttacaaatggacttcgtgcggcggaagtacatgatacacgccatcgaccgcaacctcgacttcatgaaggccgaggtccagcagaaggtctccatcttctccctcgggcacgtgctcgcgctccactacctggtcaccgcctttccgcaggcggtcatcaccaaggacgtgctcgcgagcacaaacttcttcgtgttcgtgcacatgtcgcagcggcacgaggtcttcgacgccgtgctcaaggcggccttcgacgcgcctcagctctttgtgcgggcgctctcgcggcacttcgaggccttcgttgccgccatccgggcctaccgcgcgacctgcgcggagctgctggccgacgcgcgcttcatggaggtggctgcgcgcgcggccgagctcgcggaggtcattggcgtgaaccacgacatcgccgcgaacccgctcttcgcggacggcgagcccgtgcgcgacgcggagctcattttcgcaaagaccttccgcaagaccgagttccgcgccgtcaagcgcctcgccgtgctgcggctgctggtctgggccttcctcgtgaagaaggaccttggcggcgagtacgcggacaacgaccgccaggacctgtttacgctgctgcagaaggccgcggggcccgtgcgccacagcgcgctcacagagagcatccgcgagtacctcttccccggagacaggcccagccactgggtctggctgaacgcgcgcgtggccgacgacgcagaggtgtaccgcgaccggcccgcgcgcacgctctacgagcgcgtgctcagctacgcgtactcagaggtcaagcaggggcgcgtgaacgccaacacgctcaagctcgtgtaccggctcgaggacgaccccgacatcaagggtctgctgctgcagctcatctacgacgtgcccgcggacatcgtcggcgtcgtggactccgcgaacgaggagtggcggagctacttcgtgagtctgtaccgcgagaacttcgtcgacggacgcaccttcacctcggacgcgcgcttccgcgacgacctcttccgcgtggtcgccgccgtcgatcccgacttcttcgagcccgagcgcatccgcgaggccttcagcgcagacgcgcggctgcgagagcgcttcacggacatggacctcaacaacgccttcatgtcgcacctcatctacgactccgtggaccccgacgtcgccgccgccgagcgcgggctcgcactgcgcgtgcacaacgaggactccgactacttcatccgggagtacaacacctacctcttcctcagcgagaaggacccgctggtgctggaccgcggggcgctcacgcggctctcggacgtccccgccgagcgcttccgcgacctcttcagcgacagtgtgctgcggtacttcctggacgcgaagctgggcacgctcgggctggtgctcgaggactaccgcgaggacgtggtcgccgccatgcttcggcacctgcgccgcgtcgaggacgtgtcttccttcgtgacgtacgccgcgcgcaagaaccccgcctgcgttcccggcgtcgtgcgcgcggtcgtgagcaacttcaaccccgcggtggtcgcggccatgcgccccttcctgcgcgagcacatgacgcgcgtggacgcgctgctggacggaatgccgcacctctcggaggccgaccgtcggtacatccgccgcgtggtgctgcagggccgcgcctgattcgccgtcaataaatcgcgatggtggacagcggcacgcacgacgtggactccgccgcgcaggagcgcacgcccaaccagcagaccttcttcaccaaggggctcagtccgctgatgcgccacacctacatctacaacaactacgcctacggctggattcccgagaccgcgctctggagcagccgtctgggcgactaccgcgtcacggacttctacccgatctcgctgggcatgctcaagaagttcgagttcatgttctcgctgctggcggaccccggcggcgcctgccccgcgtacgagcccaagctcaacaccgagttcctgaaccgcggctccttctcgggacggtacgtgaaccccttccaccgcttcgcggcgctgcccgagcgcgagtacatatccttcctgctgctgagctcggtgcccatcttcaacatcctcttctggtttaagggcgagaccttcgacactgccaagcacagcctgctcggcgccgtgtacaccacgcccgagcggcacatcgagctcgcgcggtacctgcggcgcacgggcgactacaagccgctgttcagccgcctgggcaacgacgacacctactcgaagcccttctctgggttcacgcgcatcagcaaccccacgcccatcgggcggctgccgccctcggacttcgagacgctggccaacctgagcaccattctctactacacgcgctacgacccggtgctctgtttcctggtcttctacgtgccggggctctccgcgaccacgaagatcacgcccggcgtggagttcctcatggagaagctctcgctcgcgcccgagaacgtggtgctgctgtagcctcaaacataaaatataggcgcctttgatcgcactgcttcagttcagacagagctaagatggcttcctacatcagcggcgctagcgccagcgcgaacaccgcccagggcggcgattctcagtacccacagtactattatcacacacgcacctcccaaggcgacatccgcgacgaaagcgaaggttgcttccacaccacggacgacgagcacttggatctgtccgacgactacctcggcgatggcgcaccacactgcggacacagccacaaccacagtcgcagagatggagatcggcaccgccagcgcgcaccgcggctctatgaggacccggtgcccgcgaacatcatggtgcccacgctcagtctagagcagctgctggaggaaacctcggtcgcggggggccttctcggcggcaggacagagagggacgtggaacagctcctggaggagttctccgcactctgtcccggggaccagatcaccgcgctgcgctgcatggcggcctccttttaccgcgacgcgctgttcgcgccgtacgcctgcatgcacctcatcgccagtcggatgcgcgtgcactacgcgcgcgaggtcgtgcacgtggccgaggacctcgcggacgcgatgtctgcgaacagcggcgtctgcttccggcggtaccgaaagcgcgtgctagaggacatgctcgcggaggagatgggcgtgtacaattacctcgcgcgcgccaacgcggacatctgcgaggacaacctgctatcggccgtggagacgctgctgcggcgcttccgtcggatgggctgctaccgctctctgtgcatgctcaagatcctcgcgctgcagcacgaggacctggccggcttcatccgccgcagcataagaaaaacctgcaacttggcacacgcgcgcacgcacacggtttacgtgtagttaccctgtaaagacgggcttgctcccgaacaagcgctcgaagaagagcgtgcacatagccttattgtccagcaagttgactatctctgtacacagcctcttgaagtacacctcgtacatgatccgctcgtttttatccagtctgaaggtcttgtcgaccacgcgctcgtaggacttcacgttcgcgatccggcgccgccaggggccctcctcgcacacgtacgcgaagaagtagcgctcgccgatctcgatggcctccgcgttcgccgcgttgtaccgcgtcactagcgccacgttggggttgtcgggggacttgaagttcttgtggtgcgttcggctcagcaggaaccagtccagcggcatgctgcgcgcctcgaactcgaaggtgagctcgtcctccagcgagcgcaggatctccacgcccacgttcccggagccctcctccgccagcgcgcggcagagcatgtccttgtacttgcggatcatgagcttgtggaagggcgccacgtcgcggcgcgtctcgctggtgcccttgctcacgcgctcgctgccgccgccgtcgctcaccgcaaacttgatcgtggtgtacttcttcttggactgcatgatcaggttgcagtacaccgcttcgaactccaccttgaagttcgcgaagagcacgtgctcgttgatcacgcgctccagacagcgccccacgcgccgcgagaacgcgatgtcggaggcgcccacctccaggaacacggagtcggtgtcgccgtacacgctgcggaagcccacgcgctccgtgcgctcgccggccaccgccgcgtcgatctctagctccgcggcgcggcccgcgaaggcctcgtcgcgcagcagcgggttgtccggcgccgccgccagcgacagccgcgtgccgcacaccgacgcgccgtctagcgtgcgctccaggtacgcgatcatggtgcgcccgatggccgtgcagctcttggccgaggcgtacgagaagagcgcgctgttgcggaagcccatgagcccgtacacggagttggccgtgatcttgtacgtgtactgcatcgagttgtagatctcgcggtccaccgcggtctccgcggccttcatcagcttcttgtacttggcgcgcgcgtccaggaaggagcgcagcagcatcgggatgatgcccttggcctcgcggtcgaagatggccacctcggcgacgagctccggcgagcgcggctcgcagggcaccgcgatgtaccgcggcgccgggaacatccgccggacgtccacggccgcgacctccgcgtcgagccggttgtccgagacgaccacgccgacaagcgtctccggcgacaggttcgcgtagatgcacacgttcgggtacaggctgttgtagtcgaagatgagcacgtgcttgttgtgcatcttctgcttgggcgccatcacgcggccgccctcgtagaagaacttggacttcgtgtccgcgcgcaccatcaccgtgcggttctccagcagcagcttcatcagcgggcccttgatgcaggtgctcgcgcggtactcgaagaccacgctctgcggcagcaggtacgtggacgcggcggccgcgatcttggtctccacgccgtagtgcgaccagaggtagaggcagaggcaggcgtcgtgcaggcagtaccgcgccatgtccagacacacgtccagcgagtagttcgcgtacatgtccgcgaggctgacgtcgtccttgccgaaggccagcgtgacgcggtcgccgggcgcgcgcgccgcggggtccgcgaggtccacggtgaagccgtcctcgtcgacgcgtttgtgcagcacgcggcacacgcgctcgtccacggtcacgtagttgccggtgctgagcacgcgagcgaacacggccgcgttcccgtcggcgtcggtgctgcggtcgccgcgaaagcggaccgcgtccggccgcgcgtcctccacgaccgcggtgcagtggaaggcgttcttggatatggcgtccagcttgtaggagtccagcttctcggtgcgctggatgaaggcgtacaggtcgaagtagatggtcccgttgttgttgttgatgtggaaggtggtgctcgagacgccgccgacgcccttgtggctggacttcgtgcgctcgtacacgcagaagttgactgtctcggtcccgtccggcagccggaagcggatgtgctcgcccgtgagcagcgacagccgcgagtccaggtaccgcaggtcgaagttgtggccgttgaaggtgaccacgaagtccagcggcatctcgagcaggcgcttggccacgcgcagcagcgtcacctcgggacacagcgtgacctccgcgtcgaacttcacgtccgccgggtccaggcagaccgggatctcgcgccgtgccgcctcctcgaggtccgcgtcggagagcatatcggagttcgtaagcgtgaatcgccgctccgcgccgtccttgtccaccacgcagaagctgatgtgcgagacggcgttcttgaagacggaaggaaactttttctcgaagtggcactctatgtcgaggaagagccccgagcgcgtcacgttgaagcgcgggatcttctccgcgaagcacgcgccggggtcgtcgcagtggaagcagttgctccccaggtcgcgcagcagcgcggggtccacgcggtagcacccgtcagggtcgatgtcgtgcgccacgaagaaccaggacacgttcagaaagtcggacatgaagacctctggcggcgcgagcttgcgctcgctggccaccagacacagctctatctccgagcgctggcgctccggaatcttcgccgagcgcgctacgatctcgtcgatgctgaccacggacatgggcccgagcgcgcgcgtccacgccagcggctgggcgatgtcggccaccgcgtccgcgcgcaccacgtagtaaaagtgctgcacgaagcgcaggtacacgacggcgttgtcggcgcggcgcgccttgaggaagaggaaccggctgtcattgccgcggttctcgaaccagttcaaacatttcagctccatttcaaagagcataataacatttcatttaaatggagcctcgcttctggggccgcgccatgtgggcggtgatcttcatcgtgctgcggcgcttcgaggagcaccgcgacctcgagcgctgcaagcggcagctgtacgtgatctgctccacgctgccctgcatcgcgtgccgacgacacgccaccgccgccatcgagaaaaacaacgtcctctccagcgaggaccccaactacgtgctcttcttcttcatcaagctcttcaacaacctcgccttcgacgacagatacaagatcgaccccgcgaaggtgcgcccgctcgtctagagcatgccctcgtacgcgcgcgagttgtccgagtacacggtcaccgcgatgccctcgcgcggcgtcacgtgcacgtgcatggagtccgtgatcacgaagcccacgcccgtgaccggctcctcgcccgcgtcgtccgtgaagagcagcccgtggttgaagaggtagaactcgttctctgcgagcgaaagccgcccgcggtcgcagaggtagtagaagatgtcgtagtcgcgcacggccagcgtgaacgtggactcgctcaccacgatgtacttgtccagctcctccagcacggacgcggccgcgcggcgcgcggtggcgcggcactgcgtcgggcactcgcacgtgtctgcagagtacaggatgcgcgttcgccccgaggcggtctcgagaaaaacgttaatcgcctccatcgcccagaagcgactcgaggatcgcgagcaccgtgcgcagcacgagcccgatggtgcagaagggaacctctcccgactccgagcactcgcggatctccgtctccacgcggtcgtgcacttttatggagggagccgtcgttccagtggcctccatcgcgacggacaccaccttggccacgaactcgcggatcttgctcatgcgccggagcacggtcacgcggaagaagacggccgcgagcaggtactcggccacgcagctcacggcgatgagcgcctgcgcgtgcctggtgttgagcacgtgcgcgtcgggcacgaagtccgagatcttcaggtgcgagagccgcacgagcgcgttggtgtccttgacgccgtcgcaggaaatgttcgcgaagatgagcttctcgtagtcgagcgcctcgaccacgcgctgcgcgtccatgtgccgctcgcccgagagcgcgcggctcaaagggccccagcacaccgagcccgcgaagcaggggtccaccacgccgtgcatcgccagcagcgtcacgtcggccaccgccgcgaggatggccgcgtcgtcgagctcgttcgcgggcgtcgcgcccgtcagggacgcgctgcgcagcgcggacccgcccggcgccgcgtgccgcgcgcagaactcgcacccgcagcccggcggcagcggcggcttcgagagcagacttatgagcccgcccacgtgcccgtgctcggtgatcagaagcgccaggatgctgtcggtgctgccctctatggcggctgtggccgcgctagaaggctctcccgtgacctgccatccgcagacaaccttgagcatcttgcgcttgagctcgttgggcgcctccgaggccagcatcgtgcgcgggaacgtcgcgttgaggcggaagtcctgcagcagcttttcgagcgtcgcggtcttggcgtgccgccctttgcgccactcctcccccaggtgccacatgagctcctcggccgtgtccagcgtcggcgagacgcgggccttgggcacgcgcgccgcgctgcgcatcagcggctccgaggcgcggaagctgccgcgcgcgtgcaggcgcatggacgcagacgaggaccgcatcgagggtctctggtggaagctcgtcatcgtgaagcgccgcgtgagcggacctacctcgtcgcgcgactcgtcgaagtccgggtcagggtccgtcgtgtcggtctcggcgctgtgcgtgctgggcgcgctgctgcgggcgctgcgcgtgctgcgcgtgctgcgggtgctctgcgtgctgaagctgcgcgagcaggagtccgccgtgtccgcttcctcgtagtggaagtccacgtgctcctccggcagccggcgcgagcgcgacttggagatgccgaccatcttgtccgcgccgaccgggcgcacgcagagcgccatcgcgccctcgcgcaccgcctgcgcgaactcgcggctggcaaccatgctggggttgaggaacttgatgatgttgaagtatggccactcgcagacgagccgcgcgcaggtcgcgacgtcgtcgacgcttctgagggccctgttcagcggggggatgttgctgccgtcggccagtgcgacgaggtcctcgggggagatctcgagcttgggaatcatctcgttcacgagcgcggggtcgatggcgtggcagacggtctctacctcggtgcgcgagagcttgagctgcgcgcaggccgcccacggcgcgcacgtgagcgcgaacaccgcggagactcggcccttgccgaccatcgccacaacctcgggctcgtagaccaggccggccttgagcagagcctcgagcacctctatgtcgtcggcggcgagcagcgcgcgcctgtggaagcacaccgcgggcatcatcttcttgcagatgccgcgggtgctcttgagggccgtgataaggtcggggagcctgacgtgctgcggctggaagaacatgacgttggcggggctcgcggccaccgcctcgtcgtacaccgacatcggcaggtcgccgtggagcccgcacggcagcaggctcagcagctgcgcgcgcgagagcttctcggcgcagaagttcttcttggccagggcggccgccgcgtcgcgggccttcttggggtataacaacatggcgggctttaaacacgaaacaaaaatccgggttgtaacatttcaattttgcatgttctgggcctcctcgcagagtttctccaggccgccggccacgatggcgtcgacgaagaggtcggcctcggtgaagcggtggttgccgcgcaccgccaccagcgcgttctcggtgaccaccaccgacagctgctgcgcagccgtgcgcaggtcgaagtgtcggcacgcgagcccgtggcccagagtctggtccagcgccgcgagcacctcctccaggctctcctcgcggtggttgtagaaccacatcagcacgaagtaggccacgtaggtgtagaggtagtgcgcgaccgcgcgggcgcgcaccagcggctggttgcagcgcgcgaaggccattccgctggcgatgaggtcgtcgtccagcgtggcgtagtcgccccagttgagcgcgctgaactgcacgctgtagaccgcgcgcacgaacccggactcgaggatgtcgatctgcgacggcgcgccccaggtcaccagccggtacacgatgccgcgctgcatcagccgcatgaggtcgccgccgacctcgcgcaggcggtgcgtcagcgaggcgaaggccagcttccgctgcgtgtactgcaggcccacggccacgcacccgtccgactccaccagcacgagcttgtggtccgtgcagccgtcgctgcgcaggccgccctcgcgcgccatcatgtcggtgacgaacatgtacttgcgcgcgcgcggcccgaccaggatgcgcttcttgccttccatgcgcagcaccacgtcctctagcagccgcgtgctgtccacgcgctccacctgcgggtggatggtgggctggtagttgtacagcagccgcggggaccagttgtaggcgaacgcgaagaggtgcgtgtccaggagagagatggggaagacgccgccttcggtggcgcgccggaggatggcgagcttggtctccgcgggcagcaggctcccggtcaccgcgccgaagaacatggggtggttgcggaacttgagcgcgtacgcgctcagcacctcctctcgcgagaatatcgagtccgcggggttggagctcgcgggcaggagcacgtcctccacgctcagcacctcgtcgatgaagggcagcaccatgtccacgttggaggcggtgaaccactccatgtccacggcgttgcgctccacgatcacccggatcgtctcctcggatatgttctcggcgaaggcgctctgcagctcgatcaggttctcggtggcgtcgatgctgagcccgaggcgcatgccctgttgcagcacgtcgttgatggggttcacgtacatggccaccgccatgcacccggccggctgcacgcgccagaggttggagtacgcggacacgtccgtgatgcgcagcgtctccagcacgttgtacatcgccgcgcgcatttccagcgtgtccacgtacacctccgcgtgctcgaagatgatgtcgagctcgaacgcggacagcggcagactcacgtagatctggcaggcgtcaaagagttcctgcgcgtactcagagaagcacgcgtacgcgatcacgcccgcgcggttgacgatgtagtccgccttgaacatcttcgtgaggtaggcgtacagcgaccggcaggccacgtgcggccttagctcgtcgagcacggcgtccagcacctcgcggtgctgcagcacggaggggtgcaggaactgcgtgaagtccaccgcggtctcatccatgaagtcggggatggtctcgaccaccaagcggtggttccgcaccgcgcggaagccggtgttcatcggcgcgatgctgtgctggtcgtggacctccagcaggatctcgtagccgatctctcggcagctcagcgccgcgcgcgcctccgtcacgctcgcgttccggaagaactgccgcaggtgctcgtccgtgcggcagagcgtgacggattgggggatgcgggaaaggtcgcaaagagggctgtggacggagatgcgccgcagcgcgtggtctacgaactcaaaaccgcgcctcgacatcgtgaagtcgcggagggcgtacatgttgtaggaacagaggcggaagaggcagtctatgtctagcatgttggaaacgcagtacgcgtgtctgtggaggtgcgggagcatggcgggcacgacctcggtcgtgttctggagcatggtgcatacgaggtcgggcgctgtgaggtcgggggtgacgatgaggatgcaggagctggagaacttgctgagctcggaggccagccggtgaaggttgtagtcgtggcgctggctgaagttgctgtttatcgtgcccgtgaagcccatgagcgccgccagcgtcaggtcctcgcgctcgatggcccagatgtctaggccggaggctatcatgcagcgcaccagcgcggcggcgcggtcgctcgtggggtagctcatggtgctgtcggtcgtgcgaatcagcatgggataatgcttcatttttacggtcgggggttgcggactgtggggcgcacagggcctgcgggcggctcgtgccggtccgcggcgttcgccgaacgcaggaacgggcccatgcgcgcccaggccatccacagccccgccgtcagcgccagcagccagacgaataccacgatcatcttttatgtagctggaactcgcgctcactccccgccgcacggcgacggggagagcccagagccgagctccatgcgcgtgctctgcacggtgagcgactccacgagcttggacacgttcatgcgcgtgttgtcgggcaccaggtgcgcgaggcgcgcgtacacgtcatcgtgcatgcgcttgctgcagcggtccaggctcgcggagagcgcggagactagcgcggtgtgcttcgcgtacacgaagtcgccgagacacacggtctcgagcccgagcacgtcggcgctctccgcgtccttgagcgccacgaatatcttctgctcctcgcgcgtcatcgagcgcatgaggtagtcgtgcagccgcgagcgcgagatgagcccctgagagatctgcgggctgcgcatgaagcgccggcgcatcgcgcacagcagctcctcgtcgacgacgtacatgctgtccttgatggagctcttctcgtcgatcacgagcagaccgtcgttggcgaccacgttgatgaaatcgtccacgtgccgcgcgtctatgtcgtagcgcgtgccgccgcactcgatgtgcgagggcggcgacttgagccggttcgcgagcgccttcacgtcggagacgtcgatgtacagcgaggactcgcgcgggacgcagccgaggatgcgcgtctcgagcggcgtgaggatgagcacgcgctcggcgccgtcgacgagcttgccgtcgtcgggggaaaagaagttgttctccacgatgctcgagacgaggctggcgagcacgccgtcgcggtaggcgccgagcgcaaactcctgcacaaagggcgcgtgcagcaagtccacgggaatgcgcatctccacgcggcgcgcgaccgacttcttcttctgcaggtgccgccggtccaccatctcgtccacgatgtccgatatgcgggagcagaggtacgccttgaggacgttggcgtttaccttgttgaagatgagccgttcgtcctccatttaagctgctcagacgagctttaaatagtggaaacacagcagcacgccgatcgccgccgctatcaggccgattagaaaaacggtggtccaggggacgcccttgggcctatcgcacgccggcttttcggtcattacggtgcgcacgatgtttaggaactcctcgaagtcctcgtccgagttggagaggaaggagccgaagacgccggtgtacagtttgtccatttactactagatattaaacggcgcttccaactcctcgtcctcgaagcccgcgccaggctcgacgacgcccaggccgcgcacgtcctgctcctcgttgaacgtggtctgagtctcgctcatgcgcacacacgtctgctcgccctcgagaccgagcacggtcagcgagcactcgcgcggcatggtgatcttcttaaccgcgaaggtgactttgccctcgccgcccgagcggtagaacaccaccggcgccaggatgagcgtcgccatctgcgcgtcgcgggttgcgaggttttctatctctcgcgtcagcggacatatctgcggctgggtgtcgtcgtcgctggtgaactccaggagagcgccggtcaggcggttgagatacagacatccggacttaaaggtgttgtcgatggccgtttcggtgttgaagttgcgcagcgacggcggaacgcgagcgccggttttgatgttgtcgtatatgttctccagcagctggtagagcagcggactggcgctcacgggcttgaggcgaccgaagtacccgctgtcgttctgccgctgcatgtcggtcttcttgctcgggtagatcttaaactcgcccttcacgacgatgagcggcgagacgagcttggatgctagactttcgacgagacacacgttgatgttggagcagctcgggtactgcgacggagttagagtcacggcctcgatgaccttggtttggctcgacgagagcgacttagcgaagttgatcgcgtcggtgcacgacatcgcctggttctcgccgaaccgcctggcggacgctgcatcctcctgctgaggagcgcggttagacgcgacggtggttttggatacagcgcgtttcattattgcggcgattttaaagtacgtgtatactttcagttttgtcgccgagcgttcagcgcctgcatgcagaggaagtacaggatgatggtgcacgggatcgtggtcagcagcgatacgaagtccatcactgtgaggacgcgcagcgccccgcgcgagcggatgcccagcgagggcgcgccgcggcgcgcgatggtggccccgttcgtcaccactaccagcagcattaggatggtcgcgcccacggcgacgcccaggtcccgcgactccatttatagtacagtatagagcgaccgcgtcacgaactctcggctggccaacacgcgtccgtcgggcgggtgtccgccggccttcccgcggaactccgggacctcgaagctggacttcgtcacgcggtacgtgtacttgccgcgccagaccaggttttccttctggaagacgccgtccatggtcacgcccgccatgaaggcgtccttgacgatgaccagcaccgcgtctagcttgcgcccgttgatgtgcgtgacgaagtccgtgccgctgcggctcgcgcagcggatgtccacgcccgagggcaggtccaccacgaacacgaagcgcttcggcgcgtagagcaccaggtccgaggacggcgacgccgaaggcgccgaggggaactgccggtggtcaaaagggtgcaccacgcccacgatggacgtgacgcggtcgtccgggaactgcgtcgcggcgccgccgccgcggtgccgcgtgaccgtgcttctgcccacgtcgtcgcagaccacgtgcagctccgacacgatcggcagcagcgtggccagcatgcggtcggtctctgtgcgcgtcgcgcagcggtacgcgatcccgcagtgcgcgtcctgcgtgcgcccgaagaagagcaccagcacgctcgcgtcctggtcgaagggacacacggccatcacgcccaccggcggcggcccgtggcctgcgtacgcggaggagaactcctgcacctcgaccacggcgtcctcgcgcgcctcgccgggcaccatcgccgccgccggccgcagcgcccgcacggtctgcttaaccgcacgcgcggcggaggccgcgctcggcgcgactacgcgcacggccgcgtgcgcgcccggcggcggcgcggttccggccatccagcccaccggcgagaagaacacgtcgcagacgtgcacgcccgcggcctgcagcgcgcgcgcgagcgcgcgcacggcctcccactcctcgcgaaaggcgctcgcgaccgcgagcgccttcagcaccgtgtccacggagttgacgggcttctggaagaggttctcgttgttgtagatgaactcggggagctccacgggcactgtgaacagcctaatctcgtgcgcgccgctgggcgtgagccgcgtcgcgggcttgcgcacgccggcgccgatctgcttgaagaagtggttcatggcgccgccggcttctcgggctccggcgggagcagactatttattcgggaggttatcctttccgaaagcacctgcacggacttccgcgtccagcgctccatcttcatgtactccttcatgccgtcgctgagcacctcgacggcctccagcttgggcgctgtcgggtcgaagaggatgctcttgagcagcgtcatcttcttgtccgcgaggaagcggaagtaagtgtagatgcagcgcagcgcgcggaagttctccgggtgcttgatggtgcacaggatcatgaagatgcaggtgaacatgccgcactcggactccatgagctggttgacctcgaggttgatgcagccgcgccgcgccttgaagttgtccacgaagaagcgcatgagcacgtccacgtcgcagttgcggttgtccaggtccgcggtctcggcgttcacgttgaagccgtccgagaaggagtagaagtagaagtacttgcaggggtggaactccgaggggctgttgccgccggagtcgtagaaggacacgagccgcgagacggtgtcgaagatgcagcacttccagtggaacatgtagcagaagccgaacatcacgtagcgccgcccggcgcgctcgatcttgtccttgagcgtgaggctgaccatgttgcagcggaagcggtccgccttttcgtggatggccgcgccgttgaggaagttcaggttgaactggcccaggtacgcgacctcggtgccgaacgcgaagggcgccaccagactctggatgctcacgttgctcatccaggcgctgcggtcgggctttatggcgatgggcactaccttggtgttcacgcccgtgctgacgcccgcgcgcgcgaggtcgtccacgttcagcggcatctgcgagaagtccacggcctcggacaccttctcgcgcaacgagggcttgaagaagaagcccagcgggaccttccactccagcgcgatcgcctcgcggaagccgtagcgacccttgaggctggccagcaacgcggtcttctgcgcgacctcgtccttctcggtgtccggcggcgcggcgtcgatgagcccgcgcttcgcgaagtccagcagcgccgccagcgggatgcacgagacgcgaccggccgtcgcggattcgtcgaagcgccgcaccacgtacccgttgcagttggtcttgaagttggacacgtccaggtgcgcgctgagccccaccaccgagtagatgtggcacagaaggttggtgaaccccagctccgggattttgctcaccactaaatccgtgtacttgtccatttatcatggagaatcatctgccggacatgctgatgtttcccaactgcgtttctgtgtttccctttgagtactcgctggaggacgtgttccgcctccccgaggagcgacggcgcgcgttcgccatggccgtgttcccgctctccaagcaccgctggaggggcgcgcggctccagcgcgacgagcgaagcgtgtggctcagcgtcgaggaggaccgcgggcgcgcgctggacgagcggaactgctcctggctctcggacgtggccgcgcgcatggtcgacgacgagggccgcgcggtcacgcccgaggcgtacgccttcatgcgcgccgcgcccggcgcgcgcgtcgccgagctcgccgcggacgcgggcgtgctagcgggccttgtcgccggcggcaacgcgctgcgcgtcttctcctcggagtccacgcaggcgcgcgagggctggaaggcgcgcagcgtgggcgtgctcggcaacgcggcgccgctggcgcccgtgccgctggcatcgctgcgtccggaagtgcagcgcgagctcttcgccgcctggatcggccgccgccccgtggtgctcacgggcggcacgggcgtggggaagacctcgcaggttcccaagctgctgatgtggttcaactacctcttcggcggcttcgagcgcctggacgccgtccgcgagttcgcggagcgcccgctcgtgctctcgctgccgcgcgtcacgctggtgcgcgcgcacaccgcgacctacctcgcctcgctgggcttcggctcggccgacggctccccggtctcgccgcggtacggcgccatcccggacgccgagcggaacacggccccgcgcgcctacgggctcgtggtggccactcaccggctcacactgactgccatccgccgctacgacacggtcgtagtggacgagatccacgagcacgaccagatgggcgacatcgtggtcgcggtcgcgcggaaactgggctcgaacatgcgatcgctggtgcttatgacggccacgctcgaggacgaccgcgcgcgcctggaggagttcctggaccggcccgcctttgtgcacatagagggcgacacgctcttccccatccgcgaggtctacgtgaagaacacgcaacagccgccgctctcgcgcaagtacgcggaggcggagctgcagaacgtggcgcaggcgctgggcaccttcgtccccgagcagggaaagtgcggcatcctcttcgtagccacggtggcgcagtgcgcgctcttcgcggagaccatcgaggccaagcaccccgggctgctggtgcgcgtggtgcacggaaaggtgccctccgtggccgcggtgctcgaggaggtatacgccgcggaccggcccgcggtgctggtttccacgccgtacctggagtccagcgtgaccgtgcgcaccgccacgcacgtctacgacactgggcgcgtgtacgtgcccgagcccttcggcggccgcgagaccttcgtctccaagtccatgtacacgcagcgcaagggccgcgtgggccgcgtggcgcccggcacctacgtgcgcttcttcgacacgcggctcgcgctgccgctgaagcgcatcgactccgagttcctgcacccgtacgtgctttacgcgcgcatcttcgggctaacgctgcccgacgacctgctcgtgcagcccagcgacctcgcgctgctgcgccgcaccgaggagtacgtcgacggcttcggcatcagcctctcgcgctggacgcagctgctggaccggcactacatgcacatggtcgagtacgcgaaggtgtacgtgcgcggcgggcgcctcgccgccgcgctggacgccttcgagcgcaccggcgtgatgacgcacgaggccaccgaggccatccgcgccgtggacatgctcgcggccgtcctaaacgtgcgcaagtccaaggaccgctaccgcgcggagtgcaaggtgctcttcgggcccttcgcgggcaaaaagttcgtggtcgccgggcggcgtccgcccggctcgcacgtgctcatggtcacagaccgcgtcttcatcgaggccgagcccccattctgaggaccaccttcttggagacgcccgagaagtcgtcggcgacgccgcggcgcgccaccacaaggcagtacgaggtcacgtgcgggcagcgcgcgatgcagcggaaggcttcctcctgcgacagcgagaaggcgaacacgtagaaggtgtgcggggacttcagcggcgtgtggtccatcgagtagatgacaccgagcttcttcatgcgccacataagcgcgttgatgtggtcggcgcgcagcgcgcggcccttgagcacgccgcagacgaagctcgagcaggccacgacgtcgtagcgcgtgttcctgccgaagaccaggtgcggcgcgccggcggcgcgccgcgcggccgcgcgattctccacgatgtcctctatggagcgctcgctcgcaaagaagtccaggaacatgtactggtaggccacggccgggcgcgacttgctgaacttcatgaaggcgtccgagtccatgatggcgtccatgtcctcagcggcgagccggtgctgcagccggatgccctcgaaggtgtggaagagccgcgcgtccgcgtgcatggacagcgcgagagtgacgaagttgagaaggtccgcgtcgccaaagcgcacgagcacgttaccgggcgtgcgcgtcttgcgcatgagccgcgcgggcgcgccgtcgttgtggctgcggcggcgcattttgtcgccgggggactcgggcggcaggtcgatcatgaccagccggtgccgctgcgcgtcctcggcgttgaagatcgaggacgtgaagcccgggtacagcaccacgcagtcgcgctccgagatggcgtgcagcacgtcgcgcttgagcccggccaccagccgctccgcgttctcgacgaagtagttctcgtagtccaggatgtcgtgcgccatccaggggaagttcaggtacgcgttcatggcgtagtcctcggcgtcgaagcagatgcgcgtgtctggcgtcgccgcgatcggaaggtccttgatgccgcggagcagcccgtcgtagtcggactcgtccacgaaggagagcaccacaaagaggtcctcgcccacggtttcgtagtcgaagaggtggtaaagctctcttagcgccagcacggcgagcgcgttgtccagcgaggcgtgcacgcgcgccaggatgctgtagaagggcgtggccatcatcacggccttgccgccctcgcaggcaacggcgcgcgggaaaatgacctccggcgtgcgcggcagccgcccgaacgtcgcgttcagcagcgcgaccgtggccgcgtcgctctggcgcaggaacactaccaccgaggggcccgagatgctgagcatgcgctcgcgcatgcgcgctggcaggtccggcgtggtcacgaggtccgcgaagcggccgccgttgtagaggtcgccgccgccgaggaaggtgagcacgtcgaagcagtgcagcacctcgttgcggaagtagtactcgttctcgagctccttggcgtacgcgcgtatgtccacgttctcgaagtttgttcgcagaccgccgccgtcgaagaaccaggacgcgagctcgcggacggcgtccgcgggcctgttgcggcggctcttgcaccagaagctcatgtagttgcgcgaggtggaggcgttcgccaggaagaagcggtggtcgaaggagatgagcacatgctcgagcaggtgcgcgagccccaggaccgcgcccacgtcgcgcccaaaaccgaagtttgatatccccaggtagacgtcccgtttcatagacggcctcaggaacaccctgacgccgttttccaacactatcattctccggtatttacttacccaaaagtagtatggggagaagtgtttgaacgtcccctcgcctttttaaatcaaaagtagacttctcgcgcccgtgcgccaccgtcacgcgcgcgcggcgcgagtccataccggcgatcaccgcgctgctctgcggtgcgtccggccgcgggaagagcacggtctcggagatcccgtccagctgcgcgtcggtgcgctgccgccacgcgtgcgcgtccgcgagctcgcgcacggccagctgcatcttgttcgtcggcaggaacgtgaacacgtacgccgccgccaggaaggctgcgaagagcacgaactcaaccgcccatgacatttagggagctgattttgttccacgcggcgacgcacgtcgtgacgggcgaccccgaggcgccgcggcgcgcggcctcgctgtgccgcggcttcggcgtggacttccgcgcgattcacgcggagttcgcgcggcggtacccgcgcaccgcggccgccgtggagcgcgcgcagccgctgcccgaagtcgatgccgcctttccgccggacgcgcgccggcaagtcgtgcggctgcgcctcgaggctgcggcgctggtcgtcaaggagtcgcgtgcgctatcggcctccatgcgcggcgtggcggtggtcgacggctgctgcgtgcgcgtgtgccgcgccaacgacgagctgctagagttcctcgcgcggcgctacgaccccgcggtctaccgctacgcggaggtgccctcgccgagcgtgcgcccgggctcgaaagtcttcgcgtgcgcgggccgcagcgtcacctttgcggccgcgcaccggagccgcatcacggccaaccgcccgctgcgcgtggtcgtgaccgaggcctgtgtggacggcgtgctcgcgcgcggcgccgcggaggtcttcgaccgcggctccggcgtgctgccccgcgcgctgcgcgagatcttctaccgcctcgacgaggacggctgtcccacgggccagacgccaggcttcgcggacagtatggcgtcgcgcagctgatctatgtccacctttttctcgtcgatctgcgccacgaccacgaaactgcgaatgtccacagcggccatggtcttggccaccgggtcgtacttgaggagcagcacgtactcgttgccgaagtgctcggtgacctcggtgatgagccggtacacgcccatgccgagcacgttcaccgcaccgtccttggcgaagagcgagaggatgttcacgcacttcagctccatctcgccctcgaggcgcgcgagcatgcgccgggtgacctcgcatactgaacaaagaggcttacctagtaagataagcgttagcttagccgcggtcggtgacgcgtcggaggccatttatggggatcaaaaacttaaaggcgttgctgctcagccacggcgcgctgaccccgcacgagccgggcggcgacgagcgcttccctgccgtgttcgtggacggcttcagcgtcatgatgaccatggcgtactcgtgcgcggacgaagacgagttccgcgcggccgtcgaggagcgcgtgcagcactggatgagcgtgtccgagagcgggcggatcgtggtcttcctcgaccgcggcgagattccgatcaagcagccgctgcgcgaccagcgccgcaaagccacgcgcgaccgcgccgcgcgccaccgcgagttcatcgccgccgcggaggcagacgcggcggcagaggccgttggcgcccgcgaggacaaacaggaggacgagcacgcggagttcgccgaggagatccgcgctgagaagcagctaaagctgcagcgcatccgcttccagctcagcatcgccaaccacgaggtcgttaagtcgctgatagagtccacgctcgcgcgcgctggcgatgccgtggagatcgtcttctgcgacggcgtcgacgcggagatggtcatgtgcgcgcgcggacgcgccgaggccgagcgtcgcgggcgctggccgctgctcgtgaccacggaccaggacgcgcttttgttcacgtccaccgatcgcgacgagaagatagtgagcaccgtctccgcctgctacgcgttcaggcccaccgagacgaccgagtacctgtgcaaacttgcggcgctggccaacggctgcgacttcttccccgggctcggcggcatatgcgtgagtgtggagtcgctgcgccgcgccacgcttttcccggaattctccgtgcgcaacgccgccgtgagtctgtgcacgcggcccatgcggctgtccacgcaggacgcgctggagccagaggccgccgccgaggtcgtggaattcatcaggcggtacgccgccggcgacgagcgcatctaccgcgaggtgccgcccggcgcgtgctgcggacgcgcgtttgtgcgcggagcgctcgcggccgagtgggccgacgcgctgccggcggccacgggtctgagcgtggtcgcggacatgatcgcgtgtctgcccgcgcggcgggaccccgcgcccgaggaggtagagcggctgctggcgctggaggcgcgcgcgcgaggcgcgcgcgtcacggatgcgatgctcgcgcagactgcgcagctgctgggttacggcgcgagtgcgggcgccgacggcgcctccgccttcgcggtctcgggcgccaagggcctgatgtgtcgcctgcgcggcacggccatgttcttcaacgcggagtacgtggaaattgaaagcgaacccagactgttaaagctgcggtagcatggtgttcccgatcgtgtgctcaacgtgcggccgcgacctgtcgcacgagcggtttctgctcatcgtgcgacagcggccgctaaaggttgttttgcggacggtgcgcaacgtctgctgccgtataaagttgtctacacaaatagagccgcaccggaacctgacggtgctgcccatgctcgacataagctgatttttcttttccgctcgtatgcgcgagttcggactcgcggcgcgcatggcccgcgccatcgaggacgtgtgtccgcgcggcgcggtgatattcgtatccagcgccgcgtccatgaccgactgcctgaacccgtcggtgttcaagcacgcggcgatatacgcggggcgcgtggaccgcgcgccgctgccgccgccctcgccggtcccggcggaggccgtgacggagccctgtgcgatagacgccatagcgccttacggcgcgcgcgtggtcctgctctcggagctgctgcggagctgcgtggccgttcaggcctaccgcctggcagtccccggcgccctcgcgctcatgaacctcgcggccgacgcggccttcgagctcgtgggcacgccctacggctttaacagcgaccgaacgtactgcttcaagctcgttgccgactgctttgctagcgtgggcgtgacaacgaagaccaggcgcatcatgggtcgcgacgtcgtgctcagccaggacttcctggagagcggcatgtggaccaaggtgctggactccgccgcggagccgccgtggctggtctagaacagcggcggcgcgcgggtcccgagcacgggccgcgccacctgcagccgctgctgcagcgcgcggcactgcgcctcggcgtcggccgtctcggcggggtcgacgggcgtcggagttgcggaggtggtcctgaacggctgcgtgttcaccgagacgcggatgcgctccttgcaggagcgctgctcgatgcagttggccagcatcttcatcacgtgcaggtactccagcaacacgaacttttcgagggtgatgccgtcgaagggcgacgaccccaccacgcccagcgggctggacaccgcgccgtcgagcacctcgccgcgggactccttgcgcgcgcgctcgagcaggtcctctgtccgagccaccacactgccgaagtcggcggccgcgggggcgggaacaggcgcagcagcgctgtccgcgtccgccggcatctcctcgatcttgagaccggccgcgaactccgaggccgcgtgcacgggcgaggcgccgcgccgcaccatgaagtcgcacagacgcgatagcgcggaggagcgcaccggcatgtcgagcaggcgctcggcctccatctcggcgaccgagtcggcgcacgcgtccggcgcgcccgcccgcacgagctcgtcgcagcaccccgcctccttcatgagcgcgggcatgagcttgtactgcgccatgttcaccagcccgtacttgagctcgagcaggtccgcgagctcggaggccatgggtcggtttttggtgtagatgacgcgctccacggcctccgccatgtccacggcctgcatgagctcgccgacgagcacgctggccacgagcgtggccagcgtgacgcgcacggtgggcacgcagaccgcgaagaaggaggtggagtgggtgaagcgcatgagcgcgccgtgcagacgcgcgaggtccgcgctgttgcccgcgtgcacgaagcgccggcgcagccgcgccagcgcctccacaaggtcctctcgcgtggtcacgcgcacgttcgcgatgcacaggtcgtggatcgcgttggcgatctgcgcgcggcgctgcggcgagctgccgggcagcagccgcgccttggcctcgacgtcgacggtgctcgagagacagccgcaggcggcgccgcggacgacgaacttcaacaacgactcgaacacgcgcgcgcccgcgcggggcgcttgcttggacgactccatttactttaaataatttacgagatcaaaataaaatgactctgcgcatcaaactcgagaagctcaagcagatcgtaacttacttctcggagttcagcgaggaggtctcggtgaacgtggacgtcggcgatggcctcatgtacatattcgcggcgctgggcgggtccgtgaacatctggaccatcgtgccgctcagcgcgagcgtggtatacgacggcgatgtcagccgcgtgttcaacctgcccgtgctcaaggtgaaggcctgtctgtgcagcttccaccccgactcggtggtgagcctggagcccgacctcgaggacaacgtggtgcggctctcgagccaccacgtggtcagcgtggactgcgacaacgagcccgtggcgcaccgcacgaacaccgccatctgcctgggcattaaccagcgcaagtcctacgtgttcaacttccggcgctacgaggagaagtgctgcggccgcaccatcgtcaacctggacctgctgctggggttcatcaagtgcatccaccagtaccagtacatcacggtctgcttccgcgacaagaagatggtgctgcacacgcccgggaaggtggacaacttcttccgcgagtactccatgaccgagtgggcgcccgacctcgagcgcttctcgttcaagatccccatctcctccgtgaacaaactccgcggcttcaagaagcgcgtggtcatgttcgagtcgcgcgtggtcatggacgccgacgacaacatcatcggcatgctcttcaccgaccgcgtgggcatgtaccgcgtgaacgtgttcatgtcctttcaggaccggtctctttcatgcgactaaatactcatgggcgggtcggtgagcctgccctcgcgggacctgccgccgccggtgcgcacgccggagatgaacatcgtgcccgagcgcgacctcgcggacacgatggcgcgcctctccaccgcagacccgccgcagccgctgggcgtcggcgacgacgcgcgcatggccgtgctgaagacgaccttccccgagttcgcgatatcgcggcccgcgacgggcatgctcgccgcgcagcgaatcaggtacgacggcgacccgcgcgtctgctgcggcgggttcgggatctcgcattactgggagaagggggcgcgccgatcgaacgtcgcgttcgagggcgcggcgctgcgcacctgcgaccccacgcgcttcgacgcgggcgcgtgcgacgcgctgctcttccgcgagtgcgccgccggcggcgtcgacgcggacttctgcgcgcactggatcaacgcggccgtgacgcggcgcacggaccgacagtcgcgcgcgcggctgaacgacatgttcgtgcgcgattgccaaaacgacgccgcccggcctcactgcgtggcctggatccgcgcgatgcgaagcgcgcgcgcgacggcggacgacggtctaatagacgccgtgctctcggtgcagagtcccgagttcaagggcaagcacatgcgctgcagctacccctcgccggccactctcgccatggccgcgaacgtggacgagccgcgcgagtgctgggaccccgagtgcgtggccgggaacgtggacttcatgctaagcgataactacacgaacctgggcttgtgtcggctctcgcgctgctccatcggcgtcacacacctgcggattgacgcgcgttcgcggctgcgcatgcggtgcgccggcgcgcttgccgggctcacgaaggcgcccgtgaaccagactgtcgtcgtcggcgacaacctcgcgcgcgccttcgagccgcgcgtggaaacgctcagcgtgttggcgctgtgcgtggtgtatctgctaattgtctggctctaaatgggggccgccgccagcattcagaccaccgtgaccaccgtcagcgagcgcatccgcaacgagctcgagcagagcgcgagcgctagcgcgaccgccgactgcgacgtcaccatcgggagtctgattatccgcaagaacctaggatgcagcgtttccgtccggaacatgtgctcggccaacgccggcgcgcagctggacgccgtcatgaaggccgtgagcagcaccttcaacgacctctcgtcggaccagaaggcctacgtgcccgggctgctcacggccgcgctcaacatccagaccacggtgaacaccgccgtcaaggacttcgagacgtacatgaagcagacctgcacggcggacgcggtcgttcacaacaaaatcaagatccaaaacatcgtcatggaagagtgcgcctctctgccagggagtccggccacgcacctggatttcgtgaacaccggcacggccgtgggcaactgcggcgtgaaggccgtgatggacgtgctcgcgaaggccagcaccaccgtgcgcaacgaccaggaggccggcaagggctaccagaccatcatcatcgcgatcgtggtcgccatcctggcggccatcttcgcctggtacgcgcggcacatgctattcatgtccacctccgacaaaatcaagctcgagctcgccaagaagcccgtggtgcactggaccacctacctggacaccttctttacggaatttccgccgtccgtctagatacgcgcaacattgaaacattatatccacctctcaaacggcggtatggtccgacgcgtcctcctcgagcgcgtggacggcatcgtcgagcactcgcgcgcagaccgacgctacttggaggccattcagcgacacctcgaggggtctacgcccgggctgcggcagatgtggcgcttcctctacgacctgctgctgacggtgttcgtcgtcatgtacatcgtcttccgcctaatcgtgcgcaaccccggcatctgcgccatcctcgcgctcgcggccgcggtgtactacctgtttttgtgtctctttagcatggactgatggcgatcacagacagaccatcgcccgcgcgcgcgtgaccagctccggcgccgcgaagacgtcctgcaccgggaagtcgtcgatctcgaacacggagccgtccgcggaccagatcacgcgcacgttgtcgctcaccgagacctcggtcagcgtcacgcccagcacaaccgcgtcgttggtgctcaccagcaccagcgcgccgggctccgcgcgccggtgcagcggcggccccgagactgagcgccgctgcacgcggaacatgtccgcgaactgcttcgagagcaagtccaggtggttgcggatgatccactcgaagaagtacgcgcaaccgccgccgccgcacaggaagcgcgaacccgcgggcatcagcagccgcacaacgtccatgtagcaggcctgcggcaggctcgcgcggtacagccgcgtcttcggcgagagcaccaccaggctggaggtgctcatctggaagaccagctggctaacggagacggtgagcgtgcacgcgggcacggaaaccacgtccaggcagatgtcgtccagaaagatgctccgctggtagaggtggtacaggatggccacgatctgaaaggccgtggcgtcgctgatggcgcaggggcggtcggcgcagcgcatctgcgcgcaggaccagcccccgaaggactcgaagcagacggtgagcatgcccgtgctcggacagtgtggcgagcgccgacacaccggaaagcccacggccttgcggcagcgcaccatggtcgagagctctatccagcagcctgcctcctcctcgcccatgcccatggctaccggcgtgaaggccgtgacgtcgtcgcagatgcgccgctccagaaaccccacgcccgaggaggggtgcgcggccggcggcgaggtgatgcgcgccgggacgcggctcggagcgggctcgggaggcgagctgcgctcgacccgggcagtcgccgccggccgcgatgccctgcgcgcgggcgcgcgctcgcgcaacttgtttgacttgctggcctcgtcgctagcgtcatcgaagcggtcgttcctgtcgccgcggacgtccgcctcgtcgcccgtcggctgcgcggcgggcgacgtgccgtcccgcgtacggcccgcgttcggcgcgaatgtcacgcgccggtgcacgtacggctccgtagagcccgtgggggcgccgcgcccgcgcccgcggcggaaggcctgccgggacgcgccgaagcgggcgaactcccccttcgcccggccccttttttcttccatgatatttatcacaaaaaaaacttctctaaatgaccaatctgctttcgttggtcgacccggaggacctggccttctgcgccgggttcccgtccttcgacgagaccatgctcgtgatcgcgggggcgcgagtgcgcttcccacgctcgctgctctcgctcttcaacgtggtgccgcgcaccatgacgcgctacgaaaccgagctcgtgggcaccgagatggtggtgggcgccgtgttcaccaccgcgtacaacgtccgccgcaacctaggcctcggcgaggagcccgtgaccatgcgcgacatcgagaagtacttcctggactccgagaacgaggtgctcacgctcatcgtgcacaacaccgacttttccgccatgagcggcgtgcgccggcgcggcggccggcgcatcgccaaccccgtcatcttccgcagcgggtccacgccgctgctcatcgtgatggagtcgcgcaagaagaccaacatctaccgcgagcgcaccgcggagcaggccaacgcctcctacagggaggtcggctcctcgctcgcgctggtcactcggtacgcgggtctgcagctggttgacgtgcacacgcccagctccgtgctaacggtctccgccgtctacggcttcaccgaggacaaggggctcaagaagctgggctccgacaaggagctcgcggactaccagtccacgccgctcaccgaccccatccggctcagcgacttctccaatatattcgacggcgtcaagaagagcatccagctcacgaacgtgcccgtgccctccaccggcgccgaggccgcgccgtaggctttcatgcgcgataaatcggatggcggcgccgacgacgcccgcggtgcacctcacgccggtgttcgtggagcctacgatcgcgcactcgctgctgcgcgcagagtcctacctcgcgatcgcggtccttgagctcgtgctcgcgctcgcgctcgcgctcgtcttcttccgcgacgagctaggctcgctattccgctgcgcgccgcgagcgccttcgccgctggacgcgtacctgcaggcgagcctcgtctgcgacggcgacgcgctgctgatcgagctgcccgagggccgggtgccggcgctcgcgctggacgggcggcccgtcgcgttcccggggtgcgagagccttttgtaccgcataaatggaccacgaaaagtacgtcttgtcgatgttcttggaggaagataactccttcttctcgttcgtcgccgcgctgtccgatgacgaggcgctcggcgccgtgcagtccgctgccgccctcctggacttcctgctctccgtggtggtccgcggcaaggagaagctcgccgccgcggggcaccactacgactccatcgcggacggacgcgcgcgcgccgcgttcgagttccgagacctgcgcgagctggcgcagctcttcgaccggcggccctgcggcgtccaggaccgcgtgcgtgtgcgcgacgggcccgcgcgcgccttcgtggacgcggcactggggctcatgcgcgagcgaggcttcgacggcacgcaggccgcggagcgcgcgcgctacatcgcgccgaacgatctgcccgcgctgggggcaatatcggccacgctctcgccgggtctataacgtaaaaaatattagtaaaattctgaaggtccgtgtgtttcgcgggcggccaacaaaccagtcgcttaaatggagggggtggaaatggacaagccgctcctctacttcgacgagatcgcgggcgcgcgcgactacgacgcggccttcgcggagaagcacgagccgcccaagatccccggccgcggacagatgaagctgctggtctgcgagctcgtgtttctcaaccggctgcacctgcacggcatgctcgacggcagcgtcatcgtgtacgtgggctccgcgcccggacggcacatctgctgcctgcactcgcacttccaggagctcggcgtctcgcttaagtgggtgctcattgacgggcgcaagcacgacccctgtctctcggggctgcggaacgtgaccacggtgacgcgattcgcggacgaggcctacctccgcgagctgcgcggcgagctgcggcgcgccaagatcgtgctcatttcggacatccgctccaaccgcgtggacacagagcccaccaccgcggacctgctgcgcgactacgcgctccagaacaccatggtgagcgtgctcaagcccgtggcctccagcctgaagtggcgctgccccttcccggactcctgggagaaggacttctacgtgccctgcggcaaggagatgctgcagccgttcgcgccgccgttctccgcggagatgcggctgctcaccgtgtactcggagacgcgcccgaagctgcgtctgatcacgctcagcgacgcggtcaactatgaaaagaggatgttctacctcaatagcgtggtccgccagcgcgtaattctgaactttgactatcccaaccaggagtacgacttctttcacatgttctgtctgctctcgtcggtggtgtgctcgtgcgaatttaaatcgcccaaagagaaggtgctgagcctgcagaaccgcttcttccgcttcctgcgcatcccgccctccatcacgctcgggctgcgccggcacgatgaaccgccacaacacgcggtacctggccaagatcctctgcctaaaggccgcggtaagaagcgaccccttcgcggtggtaagtagggacaccgtgcgcatgtacgacatcgaggtcgagtacggcgacctcgtgacggtggtcaccgtcacgcacaaactcgagaccagccgcaccgtcttccaggtcttcaacgagacctctgtcgcgtactcgccgctgccggacgactacggcgagcccatcgtgctcaccacgtacatgcagcgcgagcacaccaagttcccgctctccatgctctacatcgacgtggtcgcctcggacatgttccccacgtttaagcgccccaccgaggaggaggccgcggtggtcgcggccatgcagcgcgtgggcgggcgccgcgagcccgtgctcaagctcccgcgcatgctggacaccgagctcgtgtgcaagatactgcacctgcccgagcacccgctgcgcgtggtgcgcttcctgcgccgaaacatgttcacgggcgtggaggtcgccgaccgctcggtgtccgtggtcctcgactgacgaagggcagcacggtcagcgaggccgccgccaccaagcacagcggcagccacgcgcgcgggtccgccacgggcacgaagacgtgctggttcaggtacttcgcctggaagcgctccgcggtggagtccaccttggacccgcaggcgttggtgaggcgcacgaccgcgtccgcgacgcgcacgtccccgagcgatatcacgcagtcagagacgttgcacccggcgatgtttttcttcagcgcgcgcggcagcagcgcgtccgcgcgcttgcagggcgcgtaccagcagtagtagggcaggcgcgtgtcgcggccggtgtcgaccacggcctggctgggcttgaggcacgcgcagcgctcgtcgtccgggtgcgcgtcgcagaaggcgtaaatctcctcgtcgggcgcgtccggcccgggcgcggtcggcggcgccgcgcgacggcggaagaacatctctgaaaaaatacttcgaccagaaaacgaccaccgatcttatttcaaagataaaaatactattaatacgcactcggagaatcatgtcggtggtggcgcgcgtgtcgtacagcctgtactcgcagagcgagataagcgccacggacgtggtcatcagccagttgaagaacgacgaggacctgggcacggtgaaggacccgcgcctgggcgcctcggacgggtccatatgccgcacctgcgggctcacggagatggagtgtttcgggcactggggcaaggtgcgcatctacgagtcctacatcgtgcgccccgagtacatccccgaggtggtgcggctgctcaaccacctctgcgtgcgctgcgggctgctgcgctcgcgcgacccgtacacgacggacttggccgcgctcagcgtgcacgagatgcgcaagatgaaggaccggatgatgtccaagaagaaggcctgctggaacagcaagtgtctgcagccgtaccagaagatcgtcttctccaagaagaagatctgcttcgtgaacaaggtggacgagatacccgtccccaacgcgctcatctaccagaagctgacctccatccaccgcaagttctggccgctgctggaggtgttccaggaccccgcgaacctgttctacaaggagtacatgcccgtcccgccgctgctcatccggccggcgatcagcttctggatagacaacatccccaaggagaccaacgagctcacctacctgctgggcatgatcgtgaagtactgctccatgaacgccgaggagcaggtcatccagcgcgccgtgatcgagtacgacaacatcaagatcatctcctcgaactcgagcagcatcaacctctcctacatcatcgcgggcaagagcaacatgctgcgcagcttcgtggtcgcgcggcgcaaggaccagaccgcgcgctcggtcatcgggcccgactccgcgctctcggtgtgcgaggtcggcatccccgactacatccggaacacgctcacgcagaaggtgttcgtgaactacctcaccagcaagcgcgtgcgcgcgctgttcgaggaccgcgcggtcaagttctacttcaacaagcggctgcgccagctcacgcgcatcaaggagggcaagttcatcaaggacaagatccacctgctgcccggcgactgggtggagatccccatgtccgagggcacgaacgtgatattcggccgccagccctcgctgcaccgacacaacgtcatatcctcgaccgcgcgcgcctcgcccggctacaccatcaagatcccgcccgggatcgcgaactcgcagaacgcggacttcgacggcgacgaggagtgggccgtgctcgagcagaaccccaagtccgtgatcgagcagagcgtgctcatgtacccggtgactatcttcaagcacgacgcgcacggcgcgccggtgtacgggtccatccaggacgagatcgtggccgcgttctcgctgttccggcaccagaacctctcgctggacgaggtgctgaacctgctcgggcgctacgggcgagacttcgcgccggagcctggccagaagaccttctcgggcgccgacgtcttccgattcatgataggcgcggacataaacttcaagggcgtgctcgagaacgggcgcgtggtggcgccgaacgtcgacagcgacctcgtggtggccatgcgcgcaacctcgctagcggggctgatcgcggactacgccacgaacgtggagggcgtgcgcttcgtggacatggcctcctacgtgtacaagcggtacctggccatctacggcttcggcgtgaccttccgcgacctgcgcccggacccgagtttggttcgccggctgcacgcgctgaacaccgagaagatagagcagatcaaggacgcgtactcgcggtacctgcaggacgtcgcggacgggaagctggtgccgatggcgcccgcggacgaggccgacgcgctggactcgctgctggccaacctgaccaacctcaacgtgcgcgagatcaacgagtacatgcgcgagacgctggagcgcaaccccgataacagcctgctaaagatggcgcgcgccgggtacaaggtcaaccccacagagctcatgtacctgctgggcacctacgggcagcagcgcgtgaacggcgccgtcgccgagaccaagatatacgggcgcgtgctcccgtacgcgttccccgactccgcggacccggaggcgcgcggctacatcatcaactcgctcatgaacggtctctccggctcgcagttctacttcgcgatgctggtggcgcgctcgcagtccacggacatcgtctgcgagacctcgcgcacgggcacgctcgcgcgcaaggtcatcaagaagatggaggacacggtcgtggacgggtacggacagatcgtgagcggctcggtactgctcaagtacgcggccaactacgcgaagatcccggggtccaccaccaagcccgtggagctgctcttcccgcacgagagcatgacctggttcctggagataagcgcgctctggacgaagatccggcacgggttcgtgcgcatgcaccggcagcgcctggccaccaagatcctggcgccgttcaacttcctggtcttcgtgaaaccggcgccctcggaggcggaggcgctctccgcgcgggacctgtaccacatgatccagcgcgtgatgaacgacgtgcgcgagaagtacttcttctcgctggcgaacgtggacttcatggagtacgtcttcctcacgcacctgaacccctcgcgcgtgcgcatcacgcgcgcgaccgccgagctcatcttccgcaagctgtaccagaagctgaacgcgctgctcggcggcggcacgcccgtgggcatcatgtccgcgcaggtgctctgcgagaagttcacgcagcaggcgctctcgagcttccacaccaccgagaagagcggcgccgcgaaggtgaagctgggcttcaacgagttcagcaacctcatcagcatgagccgcaaccacaccgagatagtggcgctgaccgcgccgagcgcggacaagctgatgccgctgaaggtaaacttcgagttcgtgtgtctgggcgagctcgtgcccgagatcgagacccggccctcgggacggccctccgtgcaccgcgtggacatcacggtgcaccgcctgcgcatcaagcgcgcgcacctgaccgaggtcctggtggacaccatcatcgagcgcttcgtgtccttcaacgtgctcgtgaaggagtggggcagcgacatgaccgtggagggcgaccgcgtcacgtacacgctgctgctgcgcttcgtggagccggagcagctcaacttccacaagttcatgctggtgctgcccggcgccgcgaacaagggcaaggtgagcaggttcaagatcccgatcaccgagaccacggtctacgacgacttcgacgccgcgcgcaaggcctaccgcatgaacatcgagctcatgagtctgaaggagctggggatattcgacctcgaggacgtgaacgtggtccccggcatgtggaacaccttcgacatattcggcatcgaggccgcgcgcgggcacctctgcgagagcatgctggacacctacggcacgggcttcgactacctgtttccctcctgcgacctgctcgcgagcctgctctgctccgggtacgagcccgagtccgtaaacaagttcaagttctggaacgcgagcgcgctgaagaaggccaccttcggcgacggccgcgcgctgctgaacgcggcgctgcacaaccgcaccgacgcggtcgcggacaacagcagctgccacttcttcagcaagacgccctgcgtgggcacgggctactacaagtacttcgtgaacgtggagatgttcatgcgcatggagcgcgagatccaggcgcgcgtggcggcgcgcaagatggaggagatcgaggaggccgccgaggaggagttctaggcgcgacggcgccttactttgcgaccgtgtcacgacgacacgacacggttaggacggcgagtcgcagacgaacatttttatgagctggtagcggaagttggcgttttccaggaaggcgccgcggaggtcccggatctcgtagtaggttttgaggaagtacacgaagcgcgcgggctgcgtcatagtcgggttctccgcaagccgcttgtgcatcacgtaccccatggcggcggcgccgctgcggttgacgccggccacgcagtgcacgagcgtgggcttctgctcggcctcgaggcgcgccagcagcttcacgagcgcgggcatgatggaagcgatgttcgtcgtgtcgtcgtctctcagcggaatgtggtacgccgttatccccgcgggcgtcgagtacttggacatggtcatgttaaccagacacttgaagtcgacgccggagtccccccgcagcacggcgcgcgcgtcctcggcgctgcccaagtacacgtggtccgtgagccgcgtcatgcccgagggcagggccagcggcggccccgcgcgcgtgcaccgcagcaggagcctggcgtaccactcgctcttatcgcccatatttatttatatgatacaaatggcagacgtcacaacactgacggccaacggtctgaccctggagttcgcgcgcgagcgcgctctgcgcagtctgcgcgccgcgcgcacctccacgctggtgttcttcacgctcacgctcgcggcctcgctgttcgtgctctggctgcagctaaccgagtttcccgtcttcgaggagctcggcaagtacgcgcgcatcaagagcgcggtgcggtcctggcgcccgctggtggaggctaagacagagatcgagtccgacctcggccggcagaagaccgccgaccggcccgagctcttcgagttcaggtgcgtggacttcggcaagttctacctgccggtgaggtacagccccacgaccttcctgccgcaagccgtgcgccgcggcgcgggcgatggctggatggtgcacaaggcggcggccgtggacctcgccgcgcagcagttctgcgagtccgtgctgcggcaccgcgccaacaacgtcatcacatgcgggtcagagatgatgcggctggtgggctacagcggctacttcgaggacgaccactggtgcgccgcgacgtccggcgtgctgacgtgaacgatcacacgatggccgtgaccagcagcccggcgatgaaccacagcagccgcgagttcggcagcagcagcacgagcaccagcaggtacgccaggatgaagatgtcgaccacgtccacgtcgaagagccccatgaaggagaagagcggcgtggtgaggaagtagatggcgccgggccagaagcgcgccagccacgtggcgagcagcgaccacagggagggcgcgccgctgagccgcgtcttcacctgtatgtagtactcggggtagaccacctgctcggcgccggagagcaccacgcgcgccagagagagccgcttctccagcgtgaacacctcggtgagcaggccgctgcgcagccctccctccttgatgatcgcgtcgtagagcttcttcatgccgccgacgctgatgatgtaggcgtctagcgagacgtcgtacccgccggggtagaccatgagctcggggtcgccggtgccggggacgttggtggccagcgcgccggtcatgtaggtctccttgagctgcgtcatgtaccagccgttcgccttcatcgcctcgatgagcggcttcaccatctcgggcttgcggaaggtcatgtcgttgtcgaccaccaggatgaagtcatcgtcggagtacttggtggggacagtgccggccgatatgctctcccagaggttgaggtggtgcgctgcgcggcgctgcatctccttcggacacgtggacttgcacatgtccgtgaagaagtgcgggtagtctttggagtccacgtctttccattccaccgccttgagcacgtggtcgcccttggggtgcggcgcgggaggagatggcttgggtgccggcgcgggggccggtgcgggggctggggcaggagagggagcaggcgcgggttgaggcttgggcgggtcgtcggcgaggcccaccaggtacggcagcgtggggaacacctccttggtcccgcggccttcggcaaccccgattatgtaggccgtgatttcgggtggatccatttagttattaaaattaatcatatacaactcttttatggcggctatggattcggctatccagtccttgaccgagcccacgatgcccgccaggaacaggaagaaggcgaactccaggtccacgcggttcagagagtcgctgaagtacacgaagacgtcgctgtccgggaagaagctgcgccggaacatgttgtacccgttgaccttgtgcgcgacgtgctccgcgctcagcagcgtctcgtcgaaggggtacgggtcgctgaagcggaacacgtacatggccgggtttgcgtagtagtacttcatggtgtttgtgacgaagaggctcgccagcgagatgatgatttttttcttctcgatctcgatcttgatgtggtcctcgaagcgcttcatgttgtaggcgttggtgtcgtgcacgcggatgagcacgcgcgagtccgacatgatgtcctggaactccgcgcgcgcgtcggggctctcggcgggcgtctccgcgggccgcgccacctccgcgcacaccgtcggcctagcgcgcggcggcgtgcgcatgggccgcgcccccacgcgctgcgaagcgaaaaactccacggcgcgagcctcgcccgcgtccgcgtacgactccaccaggtagttgcggctgcgcgtggtgcggccgatggtgttcagccggtgcagctccgcgaccagccggcggtagtgcgcctccagctcctcgggcatgatggaggtgtacacctcggtgagcagcatcacggtgtcgaagtcctccttgccgcagacgcgcgtcttcacgaggaagtggtgcacagccgtcgcgatagagagccgcagcgtggactcggtgacctcgacgctggcgtccttggtcttcttcgcgctccgcgaggccatgaacgagacgaggaagtccgcgctgctgttgagcacgatgaccagcgcgacgatgaagttgaggttcagcgtcttcgcggactggaacagctcggtggccgacgcgtgcacgtcgagcaggttcgcggagagccgcaggaagaacacgccgcgcttgatctcggccgcgaagcgacgttcgtactcctgccggcgcgcgttgatcgcgatgaggaagttcaggatgagccggttgatgttgtacttcacggcccaggtctgcgtcttcatgatggtgtcgaaggacatcacgatgttgaagatgaagcgctggctgtgcgagaagtagctgtagggctcgctgaggaagatggacttgttggtcgcgggcaccaccacgcccgcgcgcgcgccggacgcgtcggtgttcaggtccgggatgttcatgccgcagatgcggcagtaggccatgccgtcctcaaagtacacgaactcctccacgaactcgttgatcttggcgaagtagtccacgtccacgcgcatcgcgaccgcgagccggatctggtgctcgcagggcggcgactcgaagcgcaccccctcgccccagcccggcggctcgcgcacgaccagcgcggtgcgcgaggccgggcggaacttggcgtcgcgcgcgttgagcagcgccgggaagaggtcgcagaggtgccggctcgagaggaacacgtacttgtacagcagccggcgcgcgtccgcggccatggcgtccacgaaggcgcggccccactccgcgaccgcgggctgctcctccgcaaagttgttcgggtagaccttgtccgtggccgcgaggaacaccttcttcacgtcgaggaagtcgcggatcacgatggggacgcgcgcgccgtcgagctcgtacatgaacacgtagcgcaggttgagcttgcgccgcgagaccgggatgccgatgtgccgacacaggtacgcgaactcgaggtacttcttcgagaagcggatgcggtccaggttcttggagacgtactgcagcatgttgcgcatgttgaaggggatctcgcgcacggcgggctccgcggcgtcgtcgaaggcggtgcgcagatcgctggtgcgctgtacgaccacggcttcgccggtggcgtcgtcgtgcaccagcacgttaacgcgccgctgccggatgaccatgtcgaaggtgttgaagaacatctcgtacatgctgtgccgagtgtcgtccgcgatgcgctcgcccaccgagaggctcgcggtggcgtcgtcacgcacctgcttctcgaacttgtacccgatgtaggagaatatcgagatcagcgtggcgtcgtcggcgtcggggttctgctccatggtcgcgaagagcaggcggatgtcgtcctccgtgatcgcgtccacgttgtacaggttgaccacgaagatggacttgttctcggcgatgaagtccgtgtaggacttggtggccgtgttcgggtcgcgcatgtacgcgcggatcttcggcacgatgctcgcgaggatggactccctggaatccatttaaggacggcaagggcgcgcgagaccgtctcaaaactgaaatcgtataaactcttaaaaaatcggtattgaaagtacgcaccaccaaataaagcgtcgaggtcgggcatgtcttcgtggcgactcaaaatgagcaagtgttcaggttccagcagcgtccagactctcgaggatctgcgtaatcgtcttcgctccgaggccttgggcaacgattgccaagagccccgcgacgacctcttccccagcggcgaggagtgtctggacatcgacgggccctgcccttgcgatgaggcggagcaggagatcgaccaggagcagttgcccgtgcccgaaaccgtgcccgaaccgccggccaagactcctaagcgccgaccagtgaagaaggataaggcagataaggcagataaggacaagtcgaccagaggcgcaaagaaaccgtgcccttcggacgacaaggatgacgagctcaagagcaacgacgtcgacaacaacgaagagtccggcgacacagacggcggcgcgagcgcccgaagccccagcgacatcgacaacgtggacgaaatggacgactccgacctcatggtggcgttctccaccatcctcgcagacttcaaggaccttacccaacgagtgaaagctctttcgtccgtgctcacggacgtgcaggcggccggcatacgcaggagcttctcgacgctcggcaaggctctgacggaggcggcccacatcgccaacaccggatctaagccagtcactgcgcctcgcaagaagaaggccgccgcctgcaagaagtaggcgcactaaatagcgaggctcggtatgcgggcgctgcacctgtcagacggcaaacttttttttgacaaggagctgacgcagccggtccccgacgacaaccccgcgtacgctgtccttgcgaagatccggatcccaccgcacctctcggatgtggtcgtgtacgagcaggacctcgagtctgcgcagcagggcctcatcttcgtcgggcgcgacgccaagggccgaaagcagtacttctacgggcgcggacacgtggagcggcgcacggccgtccgcaacgccgtgttcgtgcgcgtgcaccgcgtcatgaacaagataaacgccttcatcgacgaccacctcgcctccggcagcgaggccgaggcgcagatggccgccttcctgctcatggagacgagcttcttcatccgcgtcggcaagacgcgctacgagcgcgagagcggcaccgtgggcatgctcacgctgcgcaacaagcacctcgccgaggccgagggcggtgaggagatccgcgtcgccttcgtgggcaaggaccgagtcgcgcacgagtttgccgtgcgcgaggggcagcggctcttcgcggcgctgcgtcggctctgggacccgggcgcgcccgacaggctgctgttcgaccggctgagcgagcgccgcgtgtacaccttcatgcgacgcttcggcatccgcgtcaaggacctgcgcacctacggcgtgaactacaccttcctgtacaacttctggtccaacgtgcgctcgctggagccgcgtccctccgtgaagtcgctcatctgcacctccgtgcggcagaccgccgagacggtggggcacacgccctcgatctcgcgcagcgcctacatggccaccgcggtgctcgagctcgtcagggacggcgcgttcctggacagagtcgccgccaccgacacgctcgacgacttcgtggacatcgtcgtggactatgtaaataactctgagcaggtaaatggatgaggcgctgcgcgtggcggcgcgcgtcgtggacgggctccggccgctggacgtggccgtgtgtctcgcgcagctgcgcggagccgcgcccgagcgccgcttcccggcgctcgacgagtgctccggcgaggccttcctggactttgagttcgccggcggggacgtggcgtcgcggtacctctccgcgcacacgcgcgagctccgtgcggcggagcggcgcgagcacatggccgcgatcgcgcgctgcgtcaccgaggccgacctggcgctcgcagaccgcccccggggcaaggcgcgcgcggcgctgcgcgtgtgccgcaaccgcgagaaagtcgcgcgcttggcgaggctgctgcgcgacgccgagagcagcggcgcggacttcgccttcatacgcgcggccgtggcgtagcaaaacgtaaaaacaacacattccctaaatcgccatggacgcgccaagtctcgactgcatgctcgccgcactcgcggcgaaggcggcctcggtggaccgaggcgctcccgaggacgaggtgcaccacgaagtggagctcgtgctcgtggacccgccgctgtccaccctggccgccacgctgcgcctggcctcggagacggagtccttcatcctcttcacggtgaccgcgctcgccaaggaggagggcaagctgcgcgcgcgcgtgcccatgtcgcgcgtcgtcggcctggacgtgaagaacgtgcagctggtcaacgccatcgacagcatcgtctgggagcgcaaggcgctcgtggaggagaccgcgctgcaggaaggctgtctgctgcgccactccaccgagcggcggcacctcttcgtggactacaagaagtacctctcggccatccgcgtggagctggtaaaccgcgtgcgcgtgcgctccaaagaagtcgtcgcggacttcaagttcaagtactttctggggtccggcgcgcaggccaagagctcgctgctgcacgcactcaaccaccccaaggtgcggccctcgcccacgctggagttcgaggtcgtccccgcgggcgaggccgtggacgaggccgccgtgctcgcggagctgcgcgccgtggcgaaggcgctcttcatggcgcccaccgacgccgtcttcctggcgccgccggccgagatgccggtgcgcacgctcatgctgcagaagcaggagatccccgcgctagacctcgacggccttttcgcggtctccaagacggacggcgtctccgcgagcgtgtgcgtggacgaggacggcgtcttctgcgcgttctcgcacctcgcgtacaccatccggtacccgctcgcgcgcgaagtgcagggccggtaccggctctggtgcgaggccgtgcggcccgtgggcgagcgcgtgtggtccatgttcgtgctggtcgtggaggagcctgcgggcgatgaccgcgtcgcggccgtggccggcgccgtggaggcgctgcgcggcgtgtgtgcacgcgtcgagttcaaacctaagcgcgtggacgggcccttctcggcgacctccgagctggtggagcacatcaagagcgcgctgcagacggagccagagggcgtggtgctcttctacgcgcgcggagagaagtccaagcgcgacctcaaggtcaagcgcgacaacacggtggaccagaccacgaacgtgatgttccggtacatgtccagcgagcccatcgtcttcggcgagggctccaccttcctggagttcaagcggtacagcaacgaccgcgggttccccaaggagtacggcgcggggcgcatcttcctgcgcgaggacgtggtctaccacaacaacatctactgcatcgagttcacgaagacgcacctggaggtgggcctccgcagcgtggtcgtgcccgtgaagttcatcggcgagttctcgcaggaggggtacctgctgcggccgcgcctggccaaaacggagtgctacttccgcaacccctcattctacgggaaccagcactcggtggtgctcgagcacactcgcgaccagctgctctcggtgggggacgtgttcgacgagagccgcatggccgccgtcgggcagacgctggccaacgacgccttccgcctgaacccggacacgccctacttcaccaaccgacgcacgcgcgggccgctgggcgtgctctccaactacgtgaagacgctcatgatatcgctgtactgctcgaagaccttcctgaacaacgccgagcgacgcaaggtgctggccgtggacttcggcaacggcgcggacctggagaagtacttcttcggcgagatcgcgtccatggtggccacggacccggacgcgcgcgcgatcgagcgcgccatggagcgctacaaccgcctcaacgcggggctgaagtcgcgctactacaagtttaactacatccaggagaccatccgatccgagacctacgtggagagcatccgccaggtcatgtacttcgggcgcttcaacatcgtggactggcagatggccatccactactccttccacccgcggcacttcgccacggtgatgcgcaacctgcgcgagctcaccgcgcccggctgcaaggtgctcatcaccaccatggacggggacttcctgtcgacgctctccgagaagaccagcttcgtgatcaaccgcaacctgcaggagagcgaaaacttcatgtcgatcgagcgcgtggccgatgaccaggtcatggtctacgcgccctcgaccatggcgcagcccatgacggagtacatcgtgcgccgcgcggacatcgtcaagctcttcgcggacaacggcttcgacctcgtggaccacgcgaacttcgagaccgtgatccggcgcagccgccgcttcgtcgagggcgtctcgcggctggagacgcggccctccaccaagaacttcttcgagctcaaccgcaacgcgctcacggagatggacagcaccgacgtggccgcgctgctaaagatctacgtgctgtacgtcttcagcaagcggtaggcagaaccagggcgtcgattccgcgcccgcgccggcgcggaaggcgttgaacagctccgccagccaggctgcggtctcgcgcgcgtcgatcgggccgccgtcgtccggcggcggctcgcgcgccgcgcgcaacaccagcgtctccgcgggcggcagaggctccagagcctcgaagaccgcgcggctcgggaacagcgcgcgcatcatgcgcgcgcggtggccgaacaccgccttgaccgcgcgcagtgccgagcggttgtccagccgcagcgctcggtcaaaacgatgcacgcgcgcgggcgcgccgcggtggtcgcgctccacgagcacgtgccgccacgccagcgccgcgccgacgcggtccaggctgggcgcgagcgccaccaggcttttcagcgcatgtaaatctccgcgcatggccgacggctccatttactactgcggaggaacgcacgtggtcgcggccgcgccgggcgccgcgcttgtggtgctggacgcgcccggtgcggcggcggcggccgcgcccgcggggcagcgcgtcttcttcgccgagtacggcctcgagaagcgggccggcggcccgatcacggcgcggctgcgccgctccgggttccgcggcgccgcgaacgcctgggcctccgtggcggacttcgaggccggcggccgtccctccgcgtggacgctgcgcgcggaggaggcttcgcgcgtgccgctgccgacggacgcggcgctggtcctggcctggggcgcgcgcgaggagccgctgcgggcgtgcgtgctggcgcgcgcggcagacgcggaggcgccggtgggcgccgcgctcaaagaagccgccttcgacgcgcgggcgccggcggccgcgctgttcgcggcgctgggcgcgcccgcgctcgcgcccccgctgcgggcgcggctagtggcgccgccgggcgcgccgccgcggacgcggctctgcgagaacccggccatgctgcgcgcgttcgcggtgggctggttcggcgcgcagctgggcgaggcctccgaaaatgaaaaggtatttgccgcctttgataaggcgaggtcgtgtttggacgaccgctgatggcgacgcccgcgaacgcgcccgcgctgctcgtcgcggcgctgcgacaccgcccgtaccgcgtggagtaccacccggactgggagccggtcatcgagacgctggtggacgagtacgacgcggtcgcgccctggctgctgcgcgacgcgacgagccccgagcccgagcgcttcttcgcgcagctggcgaagccgctggcggacaagcgagtgtgcgtgtgcggcatcgacccgtacccgcgcggcggcaccggcgtgcccttccagtccccggacttcagcaagaagaccatccgcgcgatcgcgagctcggtcgcgcgcacgaccggcacgcagggctacgcgaactacgacctggacgcggttccgggcgtgctgccctggaactactacctctcctgccgcgagggcgagaccaagagccacgcgatgtactgggagcgcatctcgcggctgctgctgcagcacgtggccaagcacgtgagcgtgctctactgcatggggcgcacggacttccagaacgtgcgcgcgcgcctggacgtgccggtgacgctggtggtgggcttccaccccgcggcgcgcgacgggcagttcgcgcgcgagcgggccttcgaggtcatcaacgccttattggagctcaacgggaagtctcaagtggactgggcgcgaggattttctttttatagtgaaaattaatccgtggtcctaaatggcggcgcccatatgcgataactctcacgtgttcctcctcaagcgcctgggcgtgccgtcttcctgccggcgctcggaggacccgcgcttcgtggagatcctgactcccttcgagctctcaaactacatcgagcggcacccgggatgctgcctcttcgagacgctgcgcgacgaggaggactgctccgtcgtgcgcgtcttcgcggacgtggacatggacagcgtgctcgaggaggaggacttcgtcgcggcgctggaggacctcatcgtggagctcgcggccttcttcgaccgcttcgcgagcggctcctgcggcaccgtgcccggcgaggtcaagcgcgccatgctcgcgaacttctcggtcacgcgatccacggccgagcacaagaccagcttccacctgatcttcacggagacgtacaccacgctggacacgctggtggcggcgaagcgcccgctgctggacctgtgccggcgctcggacaacgtgctgctgcgcgcgctggacacggccgtgtaccgccgcggcgcgacgctgcgcgtggtgggcacgcgcaagacgccggagtcgagcgcggtccaccgcatgcagtcgcccgacgacgacatcaaggactacctgttcacgttcgtggagctctcggacgcgagcgtgtacttcgagctcgcggagcgcgagcagcacacgctgagcaccgtctgctgggagacctcctacatccccttcggcgacgcgatgcggcgcgtgtgccaggcggtggtcaacgacatcgtgaacctccgcgacatcaccgaggacaacttcctcgacacgccgctggtcatcgactacgcgacgcgctgcgcgctgtgcaagaagcccaagcacaagcacgcgcaccacatcaccatgggcaacggctgcctgcgcctggtcaagggcgggaacgcgcacagctgcaaggtcaagatcatccagctcgagggcaaccggctcttcacggccgcgcagatcatcatcgcgtccgaggtcgtgaagctcaccgagcgcaacgactacatcgtgtggctgaacaactcctggcgcttcagcgcggaggagtcgctcatcaccaagctcatcctggacgtgcggcactcgctgcccgcggactacgccaacgacatgctgtgtccgcgcaagcgcaaggtcgtggagaccaacatccgcgacatgctcgtggacatctccgagacggacacgcagtacgacaagctgcccttcacgaacggcgtgctggacctggccacgggcgagttcctcaccggcgaccgcgcgaaggcctgcgtgtgcacggtctccaccgggtacgccttctcgcgcgaggagttcgcggccgcggcggactcggaggccatgcgccggctggtcggcgtcatcgacgacatccagccggacacgcccgagaacgccgataaccgcgcgctgtacgagcgcgccatgtccagcgcgctctgcggcgccacgaagacggtcatcgtcttcttctacggcgacaccatgaccggcaagtccacgagcaagcgtctgctcatgtccgcgctcggcggactcttcatcgagaccgggcagaccgtgctcacggacgtgctcgacaagggcccgaaccccttcgtggccaacatgcacctgcggcgcgcggtcttctgcagcgagctcccggacttcgcctgcaacaacgcgcgcaagctgcgctccgacaacttcaagaagctgaccgagccctgcatcgtgggccggccctgcttctccaacaagatccacaaccgcaaccacgccaccttcatcatcgacaccaactaccgcccggtcttcgaccgcgtggacaacgcgctcatgcgccgcgtggcgctggtgcgcttccgcacgcacttctcctcgtcggccactcgcgcggccgccgcgcacaacgtcgagtacagcgcggtcaaggagatggacgagagcctggacaccaagatccagcgcaactacttccgctacgccttcctgcgcctgctcgtgcagtggttcggcaagtaccacgtcccgcaggtctcgctggcgcccacgcccgacgcggtccccgacttcgccttccaccgccgcgtggccgagctggtggtggccagcaacgacgcgcaccgccgcgcgatggagtcgctgtccaagctggggtacgtgctcgtgggcggcaacgtggccatgcccgcggacgccttccggcagcggctggccgcgcacttcaacgcgcgcgtgcacggcggcgacatagacgccttcatgttcaagcacaagaaggtcgtcaacgtaacggaggagtacgtggagtacgtattcatcgaagatgtcgagaataaatagacgggtatgaactcggacgtgataaagctgttcgtcgggcacgacgagtccgtgcccggcatcctgccgcaccagctcgcgaccgtggacttcctgatacgccgcgttctagacgacaacgtcagcgtgcttctcttccacatcatgggctctgggaagaccgtcatcgcgctgctgttcgcgatggtggcctcgcgcaccaagaaggtgtacatcctggtgcccaacgtgaacgtcatgaacatattcaactacagcatggtcatggtcgctaacctgttcaacgcgcccttcgtggccgagaacatattcgtgtactcgacgactagtttttattcgctaaactgcaacgacggcgtcataaactacaacggcctcggcaagtacgagaactcggtcttcgtggtcgacgaggcgcacaacatcttcgggaacaacaccggcgagctcatgatggtgatcaagaacaagacgcgcgtgcccttcctgctgctctcggcctcgccgatcacgaacacgccgctcacgctcagcagcatcatcagcctcatgtccgagaaggacgtggacgtcggcgacatcgtggtgcagggcaagaaggtgttccagatcctgctgaacgagcacggcgtgcgcgtgatccgcgaggtgctcaaggggcgcatctcctactacgagatgccggacacggacatgcccgaggtgctctaccacgggcgccgcttcctggacacgcgcgtggtctactgccgcatgtcgcgccggcaggaggacgactacctcaccgtgcgccggctctgcaacaacgagatgttcgagaagaacatgaacaacgtgtccatggcggtgctgggcccgctgaacctggtgaacaacctggacgtgctcttccaggcgcaggacaaggacctgtacccgaacctgcgcatcagcaacggcgtgctctacgggaacgagctcaccaagctggacatcagctgcaagttcaagttcttcatctcgaaggtgggcgccatgcgcgggaagcacttcatctacttctccaactcgacctacggcagcctggtcatccgcaacgtgatgctcagcaacgggtactcggagttcggcggctcgcagagcaacaatccgcacaccacgcccgacgggcgcgccaagaccttcgcgatcgtgaccagcaagatgaaggcctcgctggaggagctgctcgaggtgtacaactccgcggagaacaacgacggtggcaagctcatgttcctcttctcctcgaacatcatgtccgagtcctacacgctcaaggaggtgcggcacatctggttcatgaccatccccgacaccttctcgcagttcaaccagatcctgggccgcgccgtgcgcaagttctcctacgcggacgtggccgcgcccgtgaacgtgtacctcatggcggcggtgtactcggacttcgacgaggacatcgtctcgctggaggactacagcgtggaggacatcaacgcgctgcccttcgacgtgaagaagctcttctacctcaagttcaaggccaaggaaaccaaccgcgtgtacgccatcctgcaggagctctcggacgcgtactccgcgcgcccgcacccgcagctcgtggacgtggtgctgggggagatcgtgcgccagttcttcgcacggcactgccgcgtgcccgccgaggacgccgcgctcgtggccgccgtcgaggccgttctcggcacgcgcgaggcagcggccgagtacatccgcgcgatagtggacggacacttcttcgtgaccaacaagaccttcgggaagtgcctgctcttccggcacgagcgcgacatcgtgaccgtgcccttcgagctcgagcacgaccccttcgcgtgggcgatcaacttccgcaaggaggtcagtgtggtgaatatataacggcaaacataaatagaaagactgtccttttgcgcgatgtcgaccttccggcagacggtgtacctggcggtgacgctgcagccgcacgagctcacgctcgacttccgcggcaacgtcgcggaggcggtcatgcgcgagtacctctacaaggagaagggcgggctcatggccaccgacatcgaggtctgcctcggaaacgagatgccgctggggcgcatcgtgaacaacgcggttgtggtctcggtgccctgcaacgtgaccttcaagtactaccgcgtcggcgacaccgtgagcggcacgctcaacgtcgaggacgagaccaacgtcttcgtggactgcggagacctcatctgccagctcggcaagagctcgggcggcgtgaccttcaacgagtccaagtactgcctcgtgcgcaacggagtcgtctacgagcacggcagccgggtctcggctgtgctgcgcgaggcgcgctccggacgcgagtccgcgttcgtgttctccgcagtgctgctggacggcgtccccgccgaggagaaggacgagaagaaggacgagggcgagaaggccgcggaggaggagacgcccgcgagccccgccgccaaaaactagcattattgggccgcgcgaaccttcgataaatgcgcacgtacacgtcgctgctctcgaagctgctcaagagcaaccggcggctcgggagcacgcgcgtcttccgcgacccgctgcagcacatcagcgcgaccgcctttgtgcaccggcgcatcgaccggcaccggcgcgtctccatctgcgccgtgctcaccaccaccgacgggctcgtggtcgcgtgccggcgccggtactcctttttgtcctccgagctcgcggagacgcgctcgcccgcgcggcgcgtgctgctcgcaaccaagcacgcggacgctctcgcgcgcctcggcgccgcgcgcccgcgcgacgacgtcatgtttccgggcggcgccccgctgtccggggagtcgccgctggcgtgcgtgctgcgcgaggtcgaggaggagaccgggctgcgcggcgaccaggtcagcgtggacgagcggctgttcgtgcacgccttcatcgacgacctggtctcgggccgcgacttcgacgcgatcatcttcacgggcgcagtcgcgctttcgagcgcggaggtggcgaagcagttccggcccaacgacgaggtcaaggggctggtcttcctgcaccccgaggacgcggagggcgtgggcgtgatggcgcggctggcggcgttcgcgcgctgcgcggcgcgcctgcgctgctggggcgcggccgtcacgcgatagaggcggggtccaccacgtacacgaggcgcccgccgctcacgcgcacggtgggcgggtcgcccagcgcggtcaggaagttcccgtcgtcgtcgaagaggcgcccgccgcgctcgaggaagcccttgcgcaccgtgaccagcgccgtggaggtggagtaccacacgctctgcccgtccgcgagccgcgccgcgcgcgcgggcccgcgcgcgtccgccgggcgcgccaccagcgcggaccagccggagtcgtcctccagcggcgcgaagtccgtgaaggcctcgcgcacccactccagcgagcagcgcttgagcacgcggaagagctgcgtgaactgccgggacttgtcgcggatgagggccagcaggtcctcgtccacggtggcggcgccggagtcctggcgcgcgaccacgaagtgcacgttcacgtagcggcggtcgggcggcgtcatctcgtggctgttcaggcgcaccgcgcggcccacgatctggcgcagcgaggcctcgttccaggtcatgtccaggatgaagatgtcgttgatggagaggaagctgaggccctcggagccgctcagcgagaacacacagaccttgatcttctcgccgtcggtgttgtcgcaggcgttgaaggcgtccacgagcttggcgcgcgtgtcgcgcgtgcgcgaggagaactccacgctggagacgccgaaggcgcggaagtagagcagcagcatctcgatgccggtcacgttgacgaagggctcgaagaccagacacttgcccggcgaggccaggatgcgcaggcagacctcggtgtacttgcagctgcgctcgcgcagctccgcgagcagcgagacgtccgcggaggtcatgcggtcgccgctgacgggcgcgccgctgcggaagagccgcatggccgcctccgagaagacgcggtccttgacggcgcgcgcgaagtccaggaagagcgcggccacggcctcgtcgtactcctgcttggagagcacggacttgtcgggcgcgtcctcgaaggcgaaggtggccgcgatgcgccggtacacgcggaagaccgcggcgccggacttgcgctccatggcggccgcgcggcggtaggcctcggtctgcttcgcggtcatgtccacgtacatcatgcgcacgcgcttgcgcgcgaaggcggcggagccgtcgacgtcgtcgaagatggaggcctcgttggtgactaagtacgagcacaggccgccgagcttgtccacgaggtcctcggggttcgcgagcgcgccgccgttgaagagcggcgtctgcccgaccacgccggggcgcagcaggttcacggccatggagaactccttgacgctgttcaccaccggcgtggccgtgaggcagagcagcttcccgcggcccatggggatgttcttcgcgaggtagttgtacaccgtgcgcgcgggccgctggcgcccgtcctccttggtcagcgacatcgagatgaagttgtggaactcgtcgatgaccacgcagacgcggctgctcgacgaggcggtcttcatcagcgtgaagaagcggtggtggaagcgcgggtcgtcgtagttgatgaaggtgcacccgggcacggcctcgggcgcgaagcgcatcatcgtcgaggtccagggctgctccacgagcgccttcttcacgagcacgaccaccgtccagtccgtgaagacgtcgcgcaggtgcttgagcacgtacaccgcggtcacggtcttgcccacgcccgtctcgtggaagagcagcagcgagtgcatgctgtccaggcccaggaacacgcgcgccacgaagagctggtagtccttgaggcgcacggactcctccacgccctgcatctcggagggcatgtgcgcggtgcgccgcagcgcgtagtcgatgtaggccgcgtgcgcgctggtcatggcgacggtcggcgctccttttacggggtctgtcgtctatctattgtcggcgcgggtctgatttaggggcagtagttacaaaaacgtttccgctgctcggcgcggcgtttggaggagcggttgcggccgcggcggcgcaggcgcgcgcggcgcgtcttcgtggtgcggtggccgaaccagcgccggtgcatgaccgggtgcgagaccgcggccgcgcgatccgcgctcatgcaggttgcgtaggtgcggcacatgctgcgcagcacgcgccgcgtgcgccgctccacggcgtcgagccgcctcgcgacgatgggaaagagccggcgccagccgcgcacggcgaagagcgggcgctcgcagaccgggcgcgcgagcgcgtggtaggcgcccagcagccgcgggtccagcgagcgcacgtaggtctccacgaagccgttgccgaagacgatggcctgtgcgcatagcgggttcgtcatctccctcttggaggcgatggcgtcgcccacgaaggcgcgcacgccgcagtgccgcagcaccaggcgccgccgcgggaagtgcaggtgcgggccgagcgccgcgcgggcggcggggatgtgcagccgcggagaaaaacgcgcgcgtccctccatggcatctaagcgctccgtctgttttcagttatatcgccgcgggcggctactgcagcagcagcttgagcttgcgctggctctcgttctcgatgctcttggactcggaggtcatgctctcgtagagcagcgagtgcgtgacgtagagcgcctcgtacacgcggctggcgaaggccacgaagcggtccacgaactcgctctctacggggtccttgagcacgcggaagggcacggccagcgcgtcgcgccaggcggcggccttggtgcgctcgcgcacgtgcgtcacgaaggcggcgatggccgcgcgccgcggctcgctggcgaccatgacggcgctgtccttgagccagctgtcgctcacgcacttgaagaggcgcacggtgccgaagaggctgcagtacacgcgcagcgcgtgcaccacgtcggtgccgaagagcgtgggcagcttgagcaccacgaagcgctcctgcgtgatctcgagcagcgggcgcatcaccgcgaaggtgatcgcgtggtagtcagccacgtagaggttgttctcggtgaggtggttgttggagcggatggcgccgcgctccttgcggtagagccggttgcgcgcgctgaggtcgagcacgaccgcgtcggccctgccgcgcgctctggagcgcacgctggtgatgccgtgcgcctcgagcaccttctcgacgtcgcgctcgtcgatcatgaggtcgtgcgtgtacagactcagcatctccgtgggcatgcggttgatgtcgttcacgcgcgagcactgcaggaagtagttggtcccgtaggccaggctgggcaggtgcccgacgccgagctgcaggtccagcgcgggcgtcgagtcgaaggtgggcagcgtcacgctgagcccctcgcggatgctgcggcgcacggcctccaccgcgtccatggccgatttattggacgcacagtctgttttcatttcgcggctactgcgcagtcaccttctcggccacgatccccgcgtcgtagctgagccggtacacctcgttgcacaccacgaccatctgccgcggcacgtacatgagcgggttgtgcgcctccatgtgcgcggtggtcacgcgcaccgccagcttgtccttgcccctggagacgttggagttcagcgcggtgggcgagaagaaggtgctgggcgtaaagttgaactgcagcgtgcgcacgccgggcgtcttgccgaggatctcgccgaagacgcgcgagactgcgctgttctccgagtacagcacctcgttgccgaagcgcacgtccatgcgcgcgatgacgtcgatcttgttcttgaagtccacgcccttgaggaaggggtcggccacgaagaggtccttggcgcgcgcctccggcgagcggttgtcgccgttgtacacgttgcgctggcaggtccacacgcccacgggcacggaggcgtcgccgatgttcacggagtggatggcggtcgtgaagcggatgcgggaggtcgcgcggctgtaggcccccgtgatggcggagaacttcttggacatgttgtacacgacggagttcttcctggtggcgaacactaggatgttcgtgtgcaggaacacgcgcatgcccacgggcacgtcgtcgatgcgcacgaagacgtcggtgtcctggatggacacgacgcccgacgggggcacctcgactatctccgcggtctcggggaagccctcggggtagcagttcgagacgatcaccatgtcctccagcaggcgctccacgaaggccatcacgaagtcgccctcggactgctggaagccggggtacgatatgaagcggttgttggcgtcgctgagcacgggcttcatgtacacggacagggaggtgcacgcgtgcacgtccgtgatcaccgcggtggtgtggttgatctgctccacgcgccgccgcggcatctcgatgaaggccgggcgcgggcacaggttcttgaccatgtagccgatgaagctcagctccatggagtaggggaactccttggcgagcttggcggcgtcgaaggtctcgtcgtagaccatgacgcaggcgacggggttcagcgtgaccgtgaccgtgaccttgctgtcgctgagcttgagcgtgctgaaggtcttgtccgcgtcaaagggcgtcttgatgtaggcgtgcacgcaggcggcctccttgatgacgtcgttgggcgagctcccggtggagaggtcgttgagctcgcgcgagaagcccgagagctccatcacgcgctcgttgtccaggcaggagtcgaacagctcctcgccggaggtctcccagatggtgtccgcggcggagttcacggccacgtggcggatgagcttgtacgcgatgtagggcacgtagcacatcttgcccacgccctttatctcgggcaggtccacgctcagcacgaagttgttcatggccgagatgtacttgtcgcggatctcgaaggtcacggtgaccgcgtcgctggtggtgtccaccacgccctgcgtggtgatgtactgcggcatgtacaccgtgggcgcgcggtggtccgtggcgaacacgctggcgcgccgcacggcgtcgtcgccgcccaccaggctcaccacggagttattcatttattccctgggaaaaccagttaaataaggctcttcagagccatgcgcaccgtccggccgtcgggctccaggtagcagcgcccgtagacgccctccgtggcgcgcgtctcgttgatgagcgcgcgcacgcggtcggggtccgcgtacatctccagcggcagcagctcgatcttgggctcctcgcgcagcgcgacgaggtgccggatggagcccgcgaaggagtcgcggcacaaccgcgagcagaactcgcccacggcgccgccgtcgagcgtctccacggccagcgcggccgtgcccacgcgctgacggcagaaccagcacgtgccgtccgcggcgcgcagcgccagccgctccgcggacaccgtgttgaagtacttcggcagcacgtactcgatgcggcacgccgccggcggcgcgcaggccgacgcccgcggcgcggatatgtccacccgcgagagcgcgatgcgcttcatgggcggcggtggctgctatttatgtcgcccgcggcttttcaaaggtcgagcgagcacgccgcgaagcgcgcgggcgagaacacgtactcgtggccgaactccgggatctgcgcggcgcgcttgcgcgcgcgcatgtgcgcgaggaagttctcccaggtgagctggttgctgttgttcttcgcgtagttcttcacggtctgcggacgcaggttgcgcgtcacgcccgtgacctcgaagatcttgtccaggaagaaggagtagttgatggttttggtgggcgtgatctcctggcagaagaagaccagctgcttgaatatctcgatgacctcgttgatcttctcggtgctgaggtccagcttctcgtttttgacctggttgatgatctcgaagaccagcttgtagtccttcttgttgatcatttcgctgtccttgaggaagctggagacgtagttggcgtccacgtcctcgggccggatctggtgccggtccatcatcgcgcgcaggtcgcggatgacctcctccgagcactgcttggagagcagccgccggagcacgttccgcaggtggatgagcttgttcgacacgtggaagttggacctcttctgcacgcggatgcccatgggaaacacggtctcgcagaacaggcagaactcgtagtccgcgtcggacacgagcccgttgcggcggcagccgccgcacatgcgcaggttcatgcttgctccagccccagcacgcgcaggatctcgcggtccagcactttagtgtccagcgtgcgggttctacagaactggaggaagcccgcgagcgcgcgcgcgcgccctggctgcgagagcagcagcatgcgcgcgttctcggggtcctcgttgatgacgcgcgtgaggttcagcgagcaccgcgtgcagcgccgcggcgggtcgagctcgaccgagtacgccgcgaaccagacgttgtcgcccatgtattatttattaacacagaacgtcgcacatgttgcgcgaggacatgtacgggtcgtactcctgcccgtagatgaggatggtgcagtaccgcgagatcatgagcatggcctcctccatggtgagcaggtcgtcctcgaacatggccttgtgctgcatgtgctggctctgcttggcggccatcgcggccgcgccgtcgccgcgcagccactcgttcagacactggccgtcgccgccggcgccgctctcctgcgcgaaggtgttgcgcatggcgcgcatgagcctggcctccctggccgagcggctgagcacggtcatggggtcgtagagccaggggcctgcgtccgtgaacaggatggtgcagtacccgttggcgaaggcgtccgcgccgctgcagttgtcgatgccgtcgccgaccctgtagcacaccgcggagaccagccggtacatgatgccgttgagcatcatgtcctgcgacacctcgatgggaatgtcgctgatcacgggccgcatgttcgtgaagcagtcgcccgtgctggccatgcccccgcgccggttcaccaggaacaccagcacgccgttcgtgatcacgggcgcgcggtcgcgctcgtagaggtagccgctcgccgcgcacacggcggacgccacgtccgtgcgcgagaccgcgcccatgttctgggcgggcatgtacagcactcgcccggcctccgcggtgcacgagaagggctgctccccgcccacgtggatgggcgccgtcgatgtcgtgatcatcttgctggagtccaccaccaggtagggcaccgtgtgcatggccatgtcgcccatgcccccgatccccgttccgaacgacggccgcgacacgctcacgagcgtcggcttgaacgagactatggagaagatggaggccaagatctgctcctcgtcggtcatgatggaggcgcacgaggggtggatgatcttcattagggcgttgtcgatggactcgtcgctctcgcagtagaagacgcccatgcggaggttcaggatgcaccgccgcaggttggtgtgcagcaccgcgcgctggatctccatggacacggagtcgccgacgccgggcatcacgatgggcgtttcctcggtgagcttgttcaccagcagctggtagttgttgggtcgcacgcggctgttgtggtggagctgcgccaggagcgagaggctgtccccgttgacgaacgcggactcgatggccggcagctttacgccgaacagcgccatggcgatggggtgcacgaagcccacggagtcggacgacttgaacgagaagagcaggtcgcccgaggagctcatgtctttgaagtgcacggactggaactgcgtggcggagagcaagttctggtagctggacatgctctgcaggtcgtcgatctccttcatctgcttgtttacgcgggtcgagttcctcccgtagatgatcaccagcgggtgcgtctggctcacggatagccccgagtccgtcatggcggcgcgcacgctgttcagcagatcgaacagctccgaccggtctctgttctggatcccgacctttgccatcacagacatgagctcctggatggtcatgttcttgtggtctcggcgcgtggaccgcaggtagtcggcgatcatctcgccctccttacggatcttcatctgccagtcgtgcatggaggtcatgcggtccacaggcatgagcacgctgtcggaggacgactgcgcggcgctgccggactggcgcgagccagggcgcgcggacgacgggcgcgcggagctgccgcggctggaggaggacctggacctccgcgaggatcttcgctgcgaagagctgcgcacgggccgctgggcgcgcgccccggcggaaaccatgtcctcgcggtttatgctgaggagcgagctgcagaccgcgcacgacagcgactgctttggaatgtggatgtggtcgcactccagggacatgcccgcattgtcgtagcccgggaccaagtcgaactttgcattaaaaaaatctgatgcgcacgcgggcgattccatttataccggaagtttttatgaggtgccggtattatccacgcgatctcgcagtgtgctgggagactctagcgtagccacggaccccgtgagcagacgacgcaagtcgttgatggccgactgcgtgacggacttcgccgtctcgatgtcgcgcgtaaggctgagcgactcggcgttgaggtcgcgcacgctgtccgcgatgtcggccagctcctttttgatgaaatccttatcattatcggcgttgatgactttgtccggcactctagactctagaaccggtgacgcggcgggcgccttgatcgtcgggcagctggacgccgggtactggggcggcggcaatgattgctgtaggaagatgggcttagcggcaggcgccggttttgtcggcaagggcggcgccggcgggcactgtcgtgtagacggcgggcacgccggcgcggggcacgccgccggtggcggacatgtcggcgcagttgcgggtggacacgcgggcgcgggcgccggcgcgggacacgtcgcggcaggagccgggcacgcgggagccggagctggagccgggcacggcgcggcaggagccgggcacgtcgcggcaggcgcagggcacgcgggagccggagccgggcacgccggcgcaggaggacatgccggcgcagcggcaggacagaccaccgctgtcgcggagcacgcggcaaccggcgtggagcacgcggcgggcattacgttcagaggcgtcgactggaccttggcaccgcggggcagtagcgatggcgctaggggcgactgtccggtggttggacgctgcatgcaggcagtcgcagatttcagacgggactggtaatacctgcccgcttccttcaccgtgtacttgtcgacggagtctacctcctcatctggaggacatggctgctccggtgcgggaacgactgtttgaggacacttggtgaacagactggagctggtctccgatagcaccagtttagacttggccaagtcggaggcaaaccttcttctgagatccatttaagccttcaaaattgaacgtgtacgccgaccgctaaatggaagaatcggtggccgtcgagtacgcggacgaggacgaagatgagattgaggagtacgaggaggaggacgatgacgaggaggaagagtctgccgagggcgccgccgcctcctcggtcagcgacgtagcgctctctgccgccgagaagctggtggcctcggaggtcccggacgacgcggctgccgcggacaccaacgtgcgtcaacgcgtcaccgcgcgcgtggaggagcttaaggcgcgctacacacggcggatgagtctatttgagctcaccggaattgtagcagagagtttcaatcttctgtgtcgcgggcggctgccgctcgtggcggacgccgcagacccggcgctcgacaacgagctaaaagtggtggttcgggagctcgaggagggcgtctgccccatcgtcatcgagaaaaacggcgagttcctctcgccgggcgacttcgaccccgagtgcctgcgctaccacctgacgtacatgaccgacctctggaagtcccaggggcgcatgtagccgcggctacgccgactcggcggcctccgcgattttttcttttatcatgtccagcagctcgcgcaccacgatggggcggccgcagtacgtgatgccgttttcggatatcacgctctgtgcgatgtccaccagcgagccctcgcgctcccagtactcgcgcgcgagcacctccttgtacaacgcgcggtggttggccacgtaccgcaccagcgtctggatgttcttcacgcccacgctcttgaggtcctgcggcgagaacttctcgcgcagcgacacgaagacgtcccggacgagcttgccgatctccacgttggtcttgaactcgttgtacagcaccacgtagagcttgcacacgaccgtagcgaacttcgcgggcttgagatccttgttctggaagaccagcatgctgctcatcaccttcttcatgaaggccaggtacttcgcgcggtcgccctcgacgctcacgctcccgacctcgaggtcggacacgcagcggattccgtgctccgcgctctccgcggagacgcgcagcagctcctggtactccttgagcttctgcttgtccgtcatcagcgagttgtcgaataccgccaccagcttgagcacgtagttctcgtccgagaagaccttgttcagacacttcaccaggaagctgtagtggctctgcaggatcttcatgaccgcgttggcgccgctggctccgcggacgtgcgatatcatctccatgatcttcttagagtcgtcgatgatctcctcggtgtcgttgcgcatgttgcggtacattgcgttcagcgagaccagcgtctgcgcggccaggagcacgtcgcggaacacgcgcgcgaactcgcgcttctcctccgcgtcggtgatgctgttgtacacggacttcgccaccgcgttcgacttcaggaaccagaaggagagcgcctggtagttgaagtgcttcatcagcgccagcacgtccgcctcgctcatttccggcgcaatggggcacaccgagctctcgagcacgggcaccatgctgacgagcgtgtccacgtccgtgtcgaagtccaggcagtccacgcagagcccggtgccgcggctcaggtgatcgcggctgatgtcgtagaagcgctcgtagcaggtgcggaggcggtccatgtcggctgcgttttagagagacacacactcttgaattatggctgcgggtagaactcctgcagcagcgccggcgcacgcgcggagtccggctccactcccagcttcagcgcgcagttcacggaccaggtcttcatgaagcggtcgggcgcgtccgtgaccacgtgccggaagagcttcgcgaagtggcggctcacggcgttgggcacggtcgcgttgcgcacgaaggccgtgaagcgcgaggtcagcttcggcgcgaagcgcttgccgtccacgaagaagcccgaggtggtgagcgagagcccgttctcctcgcgcaccacgcgtcgcgcggccttgtgcggaaacatgctcgcgaggcgcccgctcgcgtcctggtctaggtggatggcgtccgtggccgcgtccttgcggatgcgcaccacgtcgtgcacgatctcctggatgaggatgcgcgtggccgcggtctccgccagccgcatggggaagtagaccatgtccccggagatgagcacgttcccgctagcgtttacgtagctcactatctcggacacggtgcgcagacgcacgatcgcgccttcgcagcagtgcaccacgtagtacccagcggtggcgcgcaggcgcttgttgtccgcctcgaagtccgcctccaacccctcgttgaagtacttgtcgaatatgatgggcaggaaggatagttttgactcggtgaccacctttccgaagttgaggatgtacgggttcagcgcgctgcggtcgacctcttcgtcgtacacgcaggacttgaaggtgtcggtgtgcgcctggctgcgcaggaagcagcacggaatgcagatgcgctgcaggcggtggaagatggagaggaagcccacgctgttgtagcgcccgtcggggtccatgcacgaaaacatgacgccgtttccgtttacgaagacctcgcgcgtctcggacttgaagaagttgttgctgaccttggccatgttcgcgtccagcgactgcacgatcacgggcttgcggttcttggtcttggtgttctggcagatgcgcgaccagtacacggtctccaccttggtgaagtccgaggactgcttcacgttgttgaacatcacgctgatggccacgatcaagaacgtgaagtacttctcgatgttcgggatgtagttctttaccttcacggacacgtgcgacttcgcgaggatgatcgagatgcgcttgtccgtggagagcaggatgttgttggtcgccgtctccacgaagatgaagctcgtttccatgtccagcttcatcttagacgtgatggtcgtgttcagcgacaccttgtaggtgatgtcgcccttgacgcggtccatctttacgtccatgctctcgatgagcttcgtgaacagactcacgtcgttcaccgtgagcgtcttcccgtcgctcgagatgaccaggtcgccttccgggccccacaccgagaggttcagcggctcgtccaccagcaggaagcgagtccccgtcatcgacacgaagaagtcgtccgtcttcgagagcaggatgtcgaagtcgcccacctccgctcgcttgtccggcgactgctgcgcgatcgcgcggagcccggactcgcgcaggttcgtgcggaagatgttgttgaacttggtctccacgttcatgtttaggtcgaggttcgcgaactcgcggatgagccgctcctcgaacttgaggatggagtcgttgggctcctcgaaggagccgaactccggcgcggaggtgtccgccgcgcgcgccacccagaccaccaggaagttgcacgcgtccgcgtacgcgttgtagaggatgccgtccgtgcggatgagcgttttcttttgcgtgggcgagaacgggttgaagatggtgttgtccacgtagctgtactccaggttgttcttgtgcgagtacacgatgatctcgtcctgcaggcccagcaggctccccaagtaccccttgagctgccgcacgcgcatggtcagcaagatgtgtctgcgcacgtgctcggggtccttctggatgtactgcttcgcgaagaagtagatcggcgaggcctcgtccacggagtcgtacagcgataggtacagcacgcgctcgatctcctggtggcgccccaccagcaccaccagctgcggcgcgacggtgtagagcatgttcgcgcgggcgtatttatagccggcgttaaactgaaataaaatacgcgggtcgcgaggcagcgccatgttccagccggtgcccgacatggccgccgaggccgacatcgacctcggcgacgtcagcgtggacgcgacgcgcgcgggcgcgcgcgagaagaccgtcttcttcgcgcgcaacaagcgcatgtacccgcaccgcagcaaggacgaggagcgcaagctgtcgctgggcttcttcttgcagcggctggacttcctcacgtcgcgcgaggtcaacctgcagttccggtcgctggacgcgctgcgcaccgagaacgtcatgaagaagaacaacgtgctcgtggcgccgtacatcctcatcgcgacgctcgcggggcgcggtttccgcatgacggagaccatggtcgagctctacttccccgagctgtaccgcgagaccagcaagcgcttccgcttctgcgcgcagataaaggtcatccaggacttcctggggttcgcccacgacagctaccacacttacgacttcgagacgtacttcgcgttcgtggcgctggtgctgcgcggcgcggactctgcggccgaggccttcgacgtccgcgccgagagcgggcttgtgcgcagcctcaccgagatcacgtaccggctctacgtgatgcagctgcgctccgacgccgcgcagtggagcgtgagcaccggcgccgtagtctcgcaggcggtgaacaccgtgctgtcggtcgtcggcgacctcgctgcgcgcgcggaggccgagcggctcacgcccgtgtgcgacctcgcgcgcgagaacccgctctcgctcgaggacctgcgcaagtacggcccgcggctgcgctcgctgctcacgaccatggcgcgcgcgcgatccttcaagacgaaccggcgggacaaggacgcgctgtcccggttctgccgactgacggcgggccctagcccgtctgcgtgccgcgcgtcgccataggcgtcggcgcgcgctcgccgccggaacactcggggtcgctgaacatgtagatgagcgcgacgcctagcagcaggtacatgatcatgctgatcacggttttgaacacgacggcggcgaacgtgttggaccgcagtcggtgctcgcagaagtgcatgaacaggtgccgcatgaggtcgatggccccgttggccacctggaaaagggcgaggccgccgatggacttgatcaccgtcacgtagcacggccgcattccgacgacgctatttactcactgtcaaaagaaacggcgccatccgaccggaggttgaggttgcgcttcatgttgttccagtacatctcaccgatgctcgagtagtacgccgtcagccgcgatattttttctcgcaccagctcgtaggccttctgcatctccgcaacgccgatctccgcgtcgcccacgtaccggccgctgcggcgcacgatcagcagcagcgccttcaggttctccagcgcgatcatgtccatgtacagcgacttcgagagctgcacgaagaggttgtaccgctccaggatgctgttcttcacctcgtccgcgatcgggactccgaagatgcgctccgtggtgtacacggactgcgtgagctgcttgaagagcgcggagatgcagcaggtcgcgcgcttgacggcgtcgagctgcttctcggagcgcgcgctcgcgatgctcagcgcgctgttcacgacgttgctcgtgtcgcgcacgtagcgcgtcttcagcgcggcgttgatggcatccgcgatctcgttgctgctcacgctcgagtcgtccgagctgcccgagacctcgtccagcagccccgagatcgtgatgtcgggcgagccgccgacggtcaccagacggtcgagcaggttgcagggcatggacatgaggatgccctcgctcgagaggcagccctcgtcgatcatgctctgcaggttgcgcttgaaggccgtgttttcgggcatgaacccgtccacgctcatgagctcgtcgaccgtgctcgcggaaaagatgcccctcacgttgatgcggtccagcatgcccatgtcctgcgagcacagcaccaccgactggtcggccgtctcggcggcgtccttggcgccgccgtagatgatgcgcggaaaccgccagctcgccggaaaagagaaggagggaaaccggcactgcgcgctcgggcctcggtagccctgcgcgtcgcgcacgttggtggccgtgaccatgaactgcagcaggtcgtgcgcggacgccatgatcttctccacctcctccttgctgcagcagaccttgcccaggctgcgcgcgatgttcgttttgctcactgagggcgagaccgtgacggcggtgtgtcggcggctgccgagcgtgtacgcgctcacgctaacgcggtaccccatggcgccgaagagcagcttcacgaagtccaggtagctctccttattgatgtagtgcggcgcgcccttgtcttccatcctcagcccggcgtaggccatgagcacttccttcatcgccgtctcggggtccgagttgcacaccagccgcagcatctggaagaactgcatgaaggcgcgctgcgagagcccgatgtggtggttgggctgcgtcgaccggcgcgggaactccctgggcgtcatggcgttgatgcccgagagcgtctccatcacgagcgcgcccacggtcttctggcccatgacgcgcgggtaaaagcacacgcggaggggctccttgccggccgcgagcgcgtccgagagcagcgagcagtacgtgacgttgtcgtggtcgaagagcgcgaaggtgtagcagacggagctcatgaagagcgagtcggcggtgctcatggacttgaactccgtgtacgcgattccgtcccagaacaggctctttccgggcgcgatcagcggggacgcgcggtcggcgcgcatcagcatggagagcagcgtcacgtagtaacggatgttggcggaaatgtctacgaactgcatgccgggcgaggccacgcgcagggtcgcgcccgaggtagtgagcacctccaggctgtccatgagcgtcacgctggggtgcagctgcgcaaggcgcgccagctggctctggtagaagatggacacggcgaggctggccacgctgccgcgtgccatgcgcaggttttgcccgttgaaggtgagctggcgcagcgagaacacggagtcgaagtactggaagaaggtgagcaggtacttgagcggcatggtcgtcagctcggtatccacctgcggcgtctgtgcgagcacgattccgttcttggccgcggcgtcggggatgtcgtacatggcgtccattctggcgcgggaggcgtcggtgagcagcgcgcgcacgttgagcagcatgagcaggtcccgcgctagcatggtcccgtcgaccagccgggcgcgaaagccgatctcggcggggccggcgatgttggggtagatcaggttcagcaggtacgtgttgtcgaagctcagcgaggggaaggagatgggagacttcgccgggaggccggtggggtagcgcacgtagccgccgcagatgcgcgcgtgcgcctcaaagctggtcacgcgagtcttcagcaggttgcgggtgaagggcggcacgtccttgaaggactgcgtgcagatcacggggttggcggtgtcggtcagcttgaggttggtgggcttaagctccgcgaagttggggcccagcagcacggggacgaggtgcgagttggcggcgctgtcgagcaggaagttgatgccgaactgcttcacggcgacctcggtttcctcgtcgctggcgagcttctccgcgtcctcgaggaagagcgcgtccagcgggtgcacgtacgtgcggttgacgtcgtagctgggcttgaagtccgaacacagcgtggggagcacggtggagacgagctggaacatgtattccgcgccctccacatggtgcaaggccatgtgcacgtttggggccgtcatttatttagtattaaatgacggccgtaccggtaaccgatattcctggagactacgggccgacgtccttttcggaggacaactacccgctgaacaagcactacgagctcaccaaaggccagctctcgatcctgcgcacggtcaacgacaagctgctcgcgcgcaccgtgcagcactcggacggggagagcgatgagagcgaaagcgaggaggacgacatctccagtccgctgccgccggacgaggaggagccggactcgtgcgtggcccgggtcatgccgcgggacgcggacctggcggcgccaaaaaaggccgacggctacatcattgccgccgagcagcagcgccagcagcgcataaacattctggtatccgatcgagaggccgtcgtggagcgggagccggttcagacgtcgttcgcgcgcgtctcggctatcccgatccacggggacggcgcgcgccgcaccaccgcctccttctccgcgaccacgccgtcgctgggcgccgtgttcgacgacgccaagcgcgtgcggctgctggaggaggaggtcaaggagctccgcagaaagtgcgcgacctctcaggataacggaaacctggagaacttcaccaaggtgctgttcggcaaggcgccgcgcgcgagcgagctgaacaagcgcgtggtcatcgtgaactacgccacgctgaacaacgtgacgctgtccatggaggacctcgagaagtgctccgacgaggaagtggaccgcatgtactcggtcatccggcgctacaacgagacgcggaagaagaagatcctggtcacgaacgtggtcatcatcgggatcaccgtgctcgagcacgtgctggtgaagcttggcttctcggaggtgcgcgggctcagcgccgacctctcgtcggagctcatcgacgtggagatcggcgaggactgcgagcacatcgcggagcgcctggggttcgggaacagcccggtgctaaacgtggcgctcttcgtggtaaagctgttcgtgcggaagctgaacctgatctgatcaacacatgccgccgtcgaggtccatggcgttcatgaggttggaggcgcggcggcgcgcgccggtggaagcggtggaggcgctcgaggtcgtggagcagggagtgttgctggaggaggcgcggcggcgggagctagaagcggaactcgaggttccgctggtggtgctgcggcgactcgtgccgctcgtgccgctcctgctagtgccagtgccagtgccgctgcggcgtgaagtaccggtgccggacctgccgctggagcttttcttgcggccgccgttaacgctgtcgatgccgagcaggtcctcgcacacctcgccgacggttccctgcacgtccaacttgccgttcttgacaaccccgtacacgatcttgccgcagttggacacagcctggatggtggtctcgtcgctgtcaaaggcgttcattccgccgcacccgccgtcgttgtttcttcgagaaggcgcgccgctgcggcgactcctggtgctgccgctggaccgagttccggaggacctggagcccgtggaccggctgccggtcgacctggtgccggtagtgcgctttctggacgaagaggaggaggcgcttccgcggcgggtggacgaactagcctccagcgcaccggcgccgcccacacaatccacgtcggcggcggcgcctccgcgaatgacctgctcgttgttgagctgcgtcaggagagatcgcagctgcggcgcgatcttctgcaaggtgctcacgtagtcgtcgtagctgctctgcgggcgctgcgccattttttcggacgccatttattacgcggaatatctacgacgacgcagcactgaatcggtttctcgcgacgggagattccgcggtcggcgccggtgcggggttgtcaccgggcgacgaggtaaccagcgcgtggaaggcgcgcacctggtcgtccgtcatcttgtcctcgaacgaggacgcgcccggggggagcaggtccttgttgcgcggaacggcgggcgccgagacgcacgaccggcggtacatcatgatgacgatgtagcacacgatcgagatgacgatcacggtcagcagcgcgtcgaggagccccatttattacctgtatatgcccgcgtttaccgggcggtgagctcaatgtcggtgttgtttagccgggcgtacgggacgctgccggagcacttcctgtacatgctgaacacgaacagcccgagcagcagcacggcgcccactatgaagcaggttacgcacagcgcgcgccacacgtagtcggtgacgttgttggtgttcttgctgaaatccacgaaggcgaagacgcaggcggccgtcagcagcagcacgccgcatatcagcactccggagtagtaagagctcaaggtctcgaatatgtccatttatctgaggagaaatttaaattactgaatggacgaagtggaatagaaaccacgagaacacgacggactgcagcacgaagatggtgctcagcttcgtcttcatgggcatgcagaagttcgcggccagcgccatacagaagatgaacacgagcaccgccgggtcgtagtcggacaccatttacactacgctaaaaggcatatctcggcgcgcgacgtccacgagcaccagcacgcggacgcccgcgggcgcgccggcggcgaccgcggcgagctgcccggccgtggggttcaccagcagcagtgcgcgcgcggttcgcgggacggggtcttcgtaggccatggtcggcgtggacccgggacgcagcggccgcccctgtctgtcgaagaggccctcgggaaacgaggtgcccggaacggccacgacgacggtgtcgctatctagaaacatttatggtcttggtttccacggatcgcctcgagtagaccgccacgaagtagaagatgacgcccgccgcgagcgccgccaccaggaagggcggcacggcgggcaggttcgcggacgcgttgtcgcgcacgccggggtccgggtctgcgtagcccgcgcccacggccttgccgcagtcggcgatcatgtgcgcgcgcgagttctgcatgaccaggctgtccacgtcgatgcggcagcccacgtagcggcaccgcgagcgctgctcgtcctggctgaagaagagccacttgcggtcgcgcgactggtccgtgcactcgtgcgcgcgacagacgcgcgggcccaggtacttcccgagcgtggtgcccgcgacacacgcgcactccggcgcggcgcggtgcgcgtcgcagtagcgccgcagcgcggagtcgccgaaggcgaaggaggcgggccgcgccacgcgcacgaactccgagcagaagcgcgcgtccatgtgcttggcgcagagcgccgcgtaggtgtccagcgccgcgtagcggcccgtgcgcagccaggccatgcactcgggcgcgtcaggctccaccgcgcagcggctggccataacgccgtcgcagtgcgcggtcttgtacccgttcgcgaacacggacgggcacccgggctccggatttgtgcagcagcgcgccatggcggcgtccgtgggcggcgccgaggcgccgatctcgaacgcgcacatggtgccctggcgcaggtacggcttcgcgatctcgggaacgtagtctgcgcgcagcagcgagcccgggcggaagaagagcgagtcgcagggcgggcctcgcacgagccgcgcgcggctcgccagctctggcgagaggaagcgcccgcactgcccggggtccatggtcggcagcagacagaaccgcggccgtacggtcttcagcttcgggtcggagaaggtttctgattcttccgcgaaggcgaaggtgtccgtggcgctcgtgtgtgtgacgcgcagcgcgtactcgcctggcgtcggcgtgtcgagcacctccaccttggatacggtgtcccccatttgaagacgctatttacgccgctgcctactcggcgaagaataggtcctccgacttggcgcccgcgtacaccgggcaggcgggcgcggcggagcgagtgcgcacgataccgcggccagtgaggcggaaggcgtagatggcgaacagcaggccgagcacgatgtacatgaaagtggtggcgcccacagacccggtcacgtgcgtcacgatgatggtgacgatggacatgatcgtgcacacgatggccatgccggtgttgttggccgcgtaggggtgcatgatctgcatggccgcacagtatccgatgaccaggcacggcagcgggaggataagtgaggcaatacctatcattactagagcgagcacgggggtggacgtcaaggccaatacaaaaatcacaatacctgttagtatgcggatatcctcgtactggaggacgctgtaaggcgcgatattccctccgggcactggcctggggttagccgggactaggggggagtcggcagtgccggggtccttggggagaaaggcattctgctcctccgggctgaagagctcggcgtcctgaacgccgccggcggtgaactcgtcgttatagtaactaaagtagctttccatttatatgttgaaaaatgtttggaggcgtacaggtggacgacaaactctacgcgtacctaaaaaaactcgccggacgcgggcggccgctgtgtctgttccgcgacaacggcgagttcgtcgaagtcttcgcggggtccgcgttccgctttgtgctgcccgtgggcctcttcgcggacctgcgcgtgcgcacgcgcggcgtggccttcccgaaactgcgcgactccgcgcgcatgcgcggcgtgcgggtggacgcgcacacgctgccctcgctgtaccccaaccagcgcatcgtggtggacgaggtgctcgcggcccgcgaccagttgctggccgcgggccgcgccgtgtacgtgacgctgcatctggcttgcggcttcgggaagacgctgaccgcgtgccacctcatcgccacgcacggccgccgcgcggtggtgtgcgtgcccaaccgcatgctggtgccgcagtggcgcgcggccgtggcggagctgcgggtgcccttcgcggtctcctgtgacggcgcggcctcgctgctgcgctcgggcgagctcgaccgcgccatggtggccatcgtggtcagccggcacttcgccaacgacgacttctgccgcgcggtgagccggcagtttgacgtgctcgtgctcgacgagtcgcacacatacaacctcatgaacaacaccgcggtctcgcgcttcttgaccaagtacccgccgcccatgtgcttcttcctgaccgcgacgccgcgcacggccaaccgcatctactgcaaccgcgtggtgaacgtgtccgtggtcagccgcctcaccaaggtagtgcgcgtggtggacgccttcttcgagccgtacaccacgcccaagatccgcacgctcgagcgcagcctcgagggaccccagaacaagtaccacgtcttcaccgagaagatcctcggcgaggacgtgcaccgcaacaagctcatcgtggacaccgtggtcgcggccatggccgcgggcgaggcgcggcgcgtgctcgtgctcaccaagctgcgcgaacacatggtcgggctgcacgccgcgctctgcgagcgcctcggtgcggagacggtctttctcggcgacgccaagaacaggaagacgcccgaggtcacgcgcgcactgcgcgacaaggaccgcttcgtgctcgtgtccacggtcttcttctcgggcacgggcctggacctgcccaacctggacgcgctcgcggtggccgcggccgtgctcaaccgcatggtcatggagcagatgatcggacgcgtgtgtcgcgagtcgcacgccaacacgcgcacgctgttcgtgttcccggactcctccgtgcgcgcgatccgcgacaccgtgtctgcgtttgcgcagcggctcgtggcgctggcggtggacgggctgggcttcgtccgcgagcgcgccgccgccggcgcgaagaacgagccggcgctgtacagcgccatcagcgggcgagatctcgcagcggtgtaagcgcggacccgcacgccgcgcacgagagcgtgctggagcaggcgagtcccagcgacagtgtggacagcctgtccacgtccttgatgctcaccagccgcgagttgcacgacgagcacacggggtcgctactatcatcgaccaccgtggtgacgcggcggcgtctgcgctttttgtttccagcggcgacatcgaccacgcctcccttagagccccccttcgcccccgccttagctttcaccgcgctcatcttttatttatcataaaaacacgtctgcgtacgcgttcgcgcacacgtcccgcaaatccgcgcgcgcgccgcagcgcgtgaagcgcgcggcgtccgcctccgcgatccgcgcgcacggcagcggcgcgcccttctcgtccgccatcacgcgcgcagagatcccggtggcccccagcgcgtacgacaccaccacgtcgccgacgcagcggtacacgttgccggagccggcgaggcggtcgaacgcggcgccctcctggcgcagcttgtcgaatatgcgaggaacgaggatgttaaaaatgagaacgaaatagcagatcagcaaaaacagcgagatcatgacctccgagagcgatttatataccttgaaagagctaatacgacttcgggactcgctgcacctcgccaccggcgccgccgtcgagcgctacaacgcgctcgtggagtgggccgcgcgcacgtactggacggtcgcggtgctgccctccgcgccgtgcgcctccatcgagaagtactactgcgtgtgcaaacccgactgcgcgctcgagcccggcgagtactccgtgagccggctgcacttcggactcacgcacgcctgggtgcgcggcgccgccttcaactcggccagcggcgccgaggtcgagccgccagaggaggtgcgtagggcctgcgaggcgctcgacgccgccttcgcggacctcaccttcgtgcgcttctcggtcttcggccgcgagtggacggtcgacgacgccgtcacagaccactcctcgcgcgacgaggtgctcgccgcgtgcgccgcctccggcgtgcgcgtcgcgcgcacgctgcgtgtgcgcgtgcgggcgggagagtccttcgcgcgcgcagacttcgacgcggtgcacgccgcgctgcgcgcggagggcgacgtcgctcgcggcaccgcggtctgtctcgcgctgcgcgggtcatcgcgccgctggatagcggaccgcgcgcctcgatgcttcatgcgcgtgcgccgcgtggagctcgagcccgtggacgcgcggcaccactgcccggtgctgatctccgcgcgcggcgaccgggtgctctgccgcggcgtggggcacctcgcggacgcgcgcgcgcgcgagggcgtcttcgtggccgtgcgcaggtacccggagtgtctggtgctctgcgacgaggcggccgccggcgcggcggagtgctcgcgcgaggaggcgctgcggctgctggtgcgccgcttcgggcgcgacttcgccgtcagcgaggagggctacgtcttccgcgtgcaggacatggacttgcgcggcgtgtccgcgcgactggggctcgcgccctgcgcgagcctggaggagctgcgccgagcggtggagcgcgaccgcgcgctgatgaggcggctgcgcgcggagggcgccgtgcgcctcgcgtgcgagtgcgtgggatacccgcgccagaacgcggtggagctcataaataatatgcgctttcaaataacggaagaaggcgcggtggcgaactttgagctggcgaacgcgagctgtctcggcaacccgaccgcggagtccatcttcgcgagcttcgcgcagttcgtgccggtcttcaacgtgctctcggcgatcgcgcgcgcgcagccatgatcgtggcggccttcgaccttggcacgcgcaaccccgcgcgcaccgtgctggaggtgctcgacggcacggtgcgcgtggtggacgtggccaagctggactggagccgcgactgggagaagcgcgtgcaccgcgacgtgaccgccttccccgcgaacgtggtgctcgtggagcgccagtgcaagatgtcgcctttttctaagttcatatacttcatacgcgggctgctctacgacgggcggcgccgcacgcgcgtgctcgcggtgccgccggccatgaccggcagcacctaccggcagcgcaagcgccgctcggtgcgcaccttcctcgcgctcgcggagagcttcggcatcctggacgccgtgcccgcgcggaagaagctcgacgacgtcgcggacagcttcaacatggccatcaattacgtgctccgaacaaactgaaatacgactggaacgaataagtcatgctggcgctgttcgagttcctgcggtccgtggaggactgctaccggcgcaccatcttcaacttccacatcgcgcacagcgccgaggcgggcgatgtctacggcgtgctgcgcgaccgcattttggcggccacgcgcttcgaggaggtagcgccgccagggctcgcggacgcgctggccaaggtggtctactgcgacataagcaccaccaagcacctggtcaaccacgcggccttcgcggcgcgcgcgcggccggcgcggcgcggaggcagcctcgcgcagttcttcgacgtgcacgtgggcgaggacgcggagagccgccgcaccgcggagatcttcgaccgcgagcgctcctcgctggtctcgtacgtgaagaccacggccaagcgctgcaagatcgactacggcgagatcaagcgcaccatccacggcgggcggcagacctacttctcggggcggcgctcggacgacttcctgagcaccaccgtgcgcgcggacccgagcaagccctggatcaagtccatctccaagcagctgcgcgtggacatcctgcaccacgcgatctgcacgcgcggcaagagctccatcctgcagaccatcgagatcgtgctcacgaaccgcacctgcgtgaagatattcaaggactcgaccatgcacataatcctctccaaggacgaccgcgagcgcgggctcgcggacctcgcggacaagctcttcgggacctacgcgaccaccttccgcgtcatcgcggccatcaccggcaacgcctgcttcgcggcggtggcggacgcggccgcgcgcgtggtcgcgctcccggacgcggacgcgaagctggcggcggtgcgcgggctcgcggagtgctacggcgtgcgcaacttcaaaatcggcatgttcaacctcaccttcacgggcgccatcgagcacacggtcttcccctcgctgatccccgcggagagcaagatcaagttcttcaagggcaagaagcttaacatcgtcgcggtgcgctccaccgaggagggccgcgagtgcgtggagcaggcgcaggcgctgctcgcggccatgcgcgagcgctccgcgcggctcgcggccgcggacgtggccaccgcgagcgtggacttcctcaaggagctgctggggccatagtgaaataatactgatttcttaaatatggagcaggcgctcggatacaagtttttgttgcccgaccccaaggacgacgtctactaccgcccgctccacttccagtatgagtcatacgccaacttcatcaagcaccggcttaaggacatcctcacggtgcggcgcacgctgctcaccttcaagaacggcaccgagtccatcgtgctcgagatcgacgacgtgaagatctcggcgccggagttctcgcccatcgtggccagcatcaagggccacagctacgaggcgctggtcaccttcacggtgaacatctaccggcacgtgatgaccaaggacggcctcaccgttaccaagatcaacagctacgagggcaccgactcgcacctcgtcaagctcccgctgctcatcggctacgggaacaagaacgcgctggacccctccaagttcgtggtcccgaacgccatcggcggcgtcttcatcaacaagcagtccatcgagaagctcggcatcaacatgatcgagaagatcaccacctggcccaagttccgcgccgtgaaggccaactccttcacgctctccttctcctcgatctcgcccgtgcacgtgatgcccgcgcggtaccgacactacaagatcctgctcgacgtgaaccagcccgacaacttcgtgatctcctccgcgaagaccttcatcaccgtgaacgtgatcgtgatggtgcagttcctcgcggacgtcacgctcgagttcgtggcgcgcaacctctgcttcgacatgccgcccgaggccgcgcacctggccaccgcgctcgtggagagcgcgaagaccgtgcccgcgggcgcggacgtggccgagtacgtgaacgcgctcatcgcggccgagcacgcgaagcagaagtcgacgctgtccaaggaggagttccgctacgagatgctcagcaacttcctcccgcacatgcaggacagcgccaaccagctcaagggcctgtacctgctctcgctggtgcgcaagatggtcttctgcgtgttcttcccgaaccggtacccggaccgcgactcgctggtctgccaccgcgtgtacacctacgggcgctacttcgaggcgctggccatggacgagctcgagacctacatcgggaacatccgcaacgacatcctcgcgaaccacaagaaccgcggcacctgcaccgtgaacatccacgtgctgaccacgcccggcttcaaccacgccttcgcggcgctgctcagcggcaagttccgcaagtccgacggcagcttccgcacgcacccgcactactcctggatgcagagcatctccatcccgcgcagcgtgggcttctaccccgagcaggtcaagatctcgaagatgttcaaggtgcgcatgtaccaccccagccagtacggcttcttctgcgcctcggacgtgcccgagcgcgggccgcaggtcgggctcatctcgcagctctccgtgctcgcctccatctcgaacatccgcaccgcggacttcgtcgagctcaccaagcgcgtctgcgactacgtgcgctcctaccccgcgcgcgacatcagctacttcgagaccgggttcgcggtcaccgtcgagaacgcgctcgtggcctcgctgaaccccgcgatcgtggacgcgttcgtgctcgacctgcgccggcgcaagcggctcggcttcttcgggaaccgcgagatcggcgtcgcgctcgtgcgcgaccgcatgaacgaggtgcgcatcaacttcggcgcgggccggctcatccgcccgctgctcgtggtcgagaacggcgtgctcgtcatggacgcggaggcggagcggctcgagcgcgacctcgccgcgatgaccttctcggacgtgctgcgcgagttcccgcacgtgatcgagatcgtggacgtggagcagttcagcttcagcaacgtctgcgactccgtgcagcgcttccgcacgctgccgcccgaggagcgcgcgctcttcgacttctgcgacttcccggccgagttccgcgacgggtacgtggcctcctcgctcgtgggcatcaaccacaactccgcgccgcgcgccatcctcggctgcgcgcaggccaagcaggccatctcctgcctgagcgcggacctgcgcaacaaggtcgacaacggcatccacctcatgttcgcggagcggcccatcgtggtcagcaaggcgctggagacctccaagatcgcggacaactgcttcgggcaccacgtcaccatcgcgctcatgtccttccgcggcatgaaccaggaggacggcatcatcctgaagcggcagttcgcggagcgcggcgggctcgacatcctcacctgcaagaagtaccaggtcgagatcccgctcgagaacttcaacaaccgcgagcgcgtgcgctccgcggcgtactccaagatcgacgtcaacggcgtggtgcgcctgaacgccttcctcgagcagggcgacgccatcgcgcggaacgtgtcctcgcgcacgctcgacgacgacttcgtcgccgacaaccagatcagcttcgacatcgcggagcggtactcggacatctacgccgcgcgcgtggagcgcgtgcaggccgacctcaccgacaaggtcaaggtgcgcgcgctgaccgtgcgcgagcgccgcgccatcctcggggacaagttcaccacgcgcaccagccagaagggcacggtcgcgtacgtggccgacgagactgagctgccctacgacgagaacgggatcgcgccggacgtgatcatcaactcgacctccatcttctcgcggaagacgctctccatgctcatggaggtcatcctcaccacggcctacgggcacaagcccttcgccgaggacggctccaaccgcccgatctgcttccccagcaccaacgagaccgacttcgagacctacatcgagttcgcgcggcgctgctacgcgctctcgcaccccgaggccgccgcggacgaccccgagttcgagcaccgcgtcttctgcgagcgcgtgctcttcgaccccgagaccgacgagcccttcgcggcgcgcgtcttcttcgggccgctgtactacctgcgtctgcggcacctcacgctggacaaggccacggtgcgctgccgcgggcgcaagaccaagctcatccggcaggccaacgagggccgccgccgcggcggcggcatcaagatcggcgagatggagcgcgactgcatgatctcgcacggcgcggccttcaccgtcgccgagatcctgcgcgactccgaggaggacgcgcaggaggtgctcgtctgcgagaactgcggcgacatcgcggcgcggctcaacggcacgcacgtctgcatccgctgctccaagatgagcctctcgccggtgctcacgcgcatggactccacgcacgtgagcaaggtcttcaccacgcagatgaacgcgcgcggcataaagatccgcgtggagttcgagaagcaggacccctgcttctacgggactccgaaacggttcagcctcgcgcccgacgagtcgctgttctcgccggaggactgaacccgccgtcgcgaccgcgtcgcgacgactagcttatcgttcgactgatgcgaaacgcgcggcggcgccgcgacttagcttatctcgactgatgcgaacgcgcgacctctcgcgactttctagcttctcagactgatgctaccatatcgcggcgtgctggccccaccaccagggcttctcgccgtggctgacgcggggctggctgcgacgcgcgctgcagtagctgcgcgcgccccagtcgccgcgcacgtgcgccgggggcaggctcccgtccagcgcgtgccgcgtcacctcggcgccgggccggcggcacgtgtgcacgtccgtcttgttggagacgagcaccgcgtactgccgcatggtctctatgtgatgctccaagtgcttgcccgccatccggttggactcgcagcacgtttttgcttcggctaaggttttttctagaggggatagtagcttatccacgcgctcgggcaggacgcacgcggagccgtcgaaccctactttgaacggggtcaccttgatgttcccgtcgtagcggtcccacagcatcctgaggtaggttgtaccgtcggggtctgggtctgtccacactctaagcttttcgctacagcggccgtcgtacgtaagacggtctctacgctcgtagtagtttctgcttatgttgttggggtctccatgctcgtagtagtataaatcgtacgcgcctggcttttttaagtcgttttcgtcgttgctgacgtgtatcacgtcgggataataggatatcctaactgcactacaatctatagtatttggtctagtaagctgttcgagatcaccttgttcatcatgatctactgatttgtacacggcaccgtcgtgttccgacggacgtatgaatatgtccatggtaaacgatgtacccactttggaaaacgtatcccatgcagtaaagcatagtccgtccattataaactcaggaacactcataacaaatcgaaatctgtgaagtttttcgaacaccacttttacatggtctttgtcacgaacatcattgccgtttacttcagacatgaattgaaggaacgctaaagagtttcttgtttcttcatgaatctttccattatacgtccatccagtttctagaattctatatatgctttttgcatcgaccccgtaccaccagtacatgggaactccgaaatatatagctgggtttgagtaccaatgggcaagagtgcccattgcgtttaaaaagtcttgacaaaaaaatgcagtttttctgtcgataacttgacttggactacgttcgtggacatcgtacatgtccataattggttcattggtaacggttacatgacccgtcattatctttttaacaatcataagatacagtttgcctaaagtcgaaatatgtataacgttaatttttacatgttctcctaacgtaattgcgtttttacttagccattcgtcgtctacaaaaatcttacgatacataggatttctctctacgtatcttctaaagtatagatttaccggtctaccggcgacattagcgccatctatagcaggagcaagctgtatgtatcgtcgtataatgtctcgtataagctttctgtcttctctgggaatacacgacacggaacttagagactggtgccagtgtctttcaaccaaagacttgaacctagcaaccaacgcgttgtcactctccatttataattaaataattatcccaacttcgtatgttaatccttattaccagatagcaccgctccttcctctccaccacgtactatctaaaggatacctgtaagggtaatgtctggataacgggcgtgtgagccaagacgtgttatggtgtcttccccaccaacggtccacttctctaactaccggagtgctagacgttgtcgatcccactactgttgtttctccattacctgtaatctttgaagcgcaacaagtgttagtctttgccaaatcttctaacggcttaattaggtcgttaagtctgtcaatatccatgcactgaggtgtatcgttaccagtttccccaactttgggaggaacttcctgtttagtgtccaaataacccataaacctgtctctaagcattcttctgtacgtgcttttgtcattgtctatgtctcccaaaaacctgtgatttacgcatccgttgtacgtaagtctgtcccttcgctctcgctcgttatttcctacttcttctattgtactgtaatgttgatagtccaagtaatagccactgttttcatgatttcttgtaaatataatcggtgttttattattgacatcgtgttgcctactgtacgtatcttccatggatctaggaacttgtctagaaaattgaggactagaaatacgccttccaaatcctggatgataaaccaaacgcaatgcactacagtcgacatcgtcactgtctctagttatcccatcaacaactccttctttgtgatgctccactgttttaaagttaactcctctgtatatgttgagtgttaaaaaaatatccacattgaacgcagttccatattttgttattttatcccacgacgtataacacaaaccatccataatgaattccggaaccgatactacaaaattagtatcgaacttatcaaacgaaatgtttactcgcggttgtgcttcgtattttttgtcatacacatctgtcatgtattgtacaaaatctatagctcctctagcatcgggcatgctaacgtctggaaaatcattttttaactgttctagtacgaactgttgattttggtcatctctccaccagtacattggcaatcctatcacaagagacttatttttataataatttgctacagaagctatatgccacatgaaattatagcaaaaataatccatctgtatgtttaaaaccggtttactagtctgctgagagtagctatccatgatagtgtttccctcgccaatacttcctgacattattctgtaaacaaccattaacaaaaatcttcctaccgttgttatgttgtcaaaagttcttatgttttgagcactttcgagtaaccatatgttattttcaaatatacttttgtaaactggatttctgtccacataactctttaaaaatagatttactggaaggccgcttgggttatctccctgtataggcggcgcttgctttatgtattcgcgtaacaaatctcttacaacttttctagttcttctaggtatacatgacctattattcaaaggctttgtccagttagcgtttataaacgttgtaaagtcactgactagcttctccatttataattaaataattacagacggcaacacagcggttatctaatatctgctgtatcctgtctgtacatctatttttctgttgagatcaagaagagctttacgtagactctccaagtgtctttctagtctgtctaaccggttacctgtttctctgcagcaatcagttatagttttgtaactgtctaacaagcttacgaggcgctcttccacactttctttagttggagctccagccgcgtacactccgttggttgaattgcctgtatcatcaggctgagtcaataggttttctccgtcattttcatccatattgagtccaacgaacacaaacgagtaagtgttcctctatttaaagtattgattttagaaaaaggcaagcctcgctgccctgattcggcggcaaacacgggttgaacacgcggaagtcgctcgcggccgtgaagatctcgtccgcgcacgcctccacgctcgcgaagcgcccaggcgagacgccgtcgtgcgagcggaacccgaactccgaggccgccaccgccgcgcccttgaagagcacgcagcgccacttcttgcgcacgtcgaaggcctcgtcgttggggtcgaacacgcgccggtccacgcgcgggccgcccgccgtgcgcgcgaactccagcgccgcgttcgccgcgttgaactcgcggatgttgtcgtagttctcgtagacggcccagagctgcagcgccacgaacatggcggccgccgccgcgagggccacgcagagcgcggacaccgcgtccatcttttatgtgcagaattattcgttggcgcggagctcgcgcagctccgcggcgcgcagccgcgcgaaggctgctttgagcgcgcgcagcagctcctcggtgtccgcgcgcagcatgtcgaagcggtggtagctgtccaggcgcgcgcggcagccgaagaagcgtgcgacgcacgcggtgacgatgtcgttcacgtagagcacgcccgaggccgtgcagtacacggagcgcggctcgcgcgggtccggcggcacgtccacggcgaccgcgtgcgcggccacgtcctcgagcaccttgcgctcgagcacggcgaggaagtcgcgcagctggcggcggttgtccagccaggcgtaggtggtcgcgaagagcgtgagccgcccgcgcggcgcgatcgcggtgtagggcgcgtacccgcggaactcccgggggtgcacgaccttgacgttctcgtgctcgcgacggaaggcctcggtgtcgagcagcgccgcgagcgcgtccacgagcttgtcggagacctccacgcccgcgccgaaggcgatgagctcgatcttctgctcgctcttggggcggaagtcgtggaaggtgtgcagcagcatctcgcggagctgcggcggcttctcgacggcctcgagcgcgtcgccgcggacgaggaagtagtcgaggtcgtgcagcgagacgtgctgcccggcggcgctctgcacaaacttgaggaagacgcagaggcccgcgcggcgctcgagcacgtcctcgacgtgcgcgtggaatacgtgccgcgagggcatggcctcgatcgcggagagccactcctcgttgacgcaggtggtggtgttctccagcaccacgccctgcgtgagcgcgggccactgcaggtggaaggcgaactcgtgcttgatgagcgaggccacggccgggtccaggtccacggccagcgcggcctcgccgacgaggggagcgtccgccatcacgcggaggacgcctggcccatctcctttttcgcctttttattcaggatcattattctttcgttgacgaggtccatgagcatcttgatggcggcggccgcggccgccgcgtcgccgccgcacatctgcgcgatgcgcgtgagcatgtgcagcagcgcggcctcgtttaggtcctcctccatttagaggccgtgagggcgcgcgtcgtcgcgacgaggggacgcctcccgcggcagcgtggtgcgcacggcgaaggcgagcagcgcgccggcgcactgcgtgagcacacactccgcgagcgcgacgaggagctcggagggcgcgagcaccatttagaggcgcgcgcgggtttaattgccgccgtcagagtcggcatcatcgcccttgtcgccgccgtccttgcagtcgcccttggtctcggcgtcgacgatgtcggcgagccgcgtcttcatgtgcgagaactgcgcgagcaggatgccggggtcgagacagcgcttgacgacgctctcgtcggcgaagtcgtagcagatgcgctcctggttctggcagaacaccgagtcttcgatgatcaacaccctcctggtcccggccgaccgcatgatggccatggcccggatgagcctcttcttcgatccgcgtatggacatggaccggagcacgttctccacgtcggagtcggagacgttgcagcagcagaggtgcgtgatgctggcgcgcccgttgacggggatgtgcttgtaggtctggcagagcagcaccagcgacacgttgatgtgccgcccgtagttcatgaggcccaagagtgtgggcgaccgcgtctgcgtgtcgcccatatcgtcgagaatgatgaggaacttctgcttcttcgtctgcgcgtgccgctcgatcttgcgcttggcgaccgagaggttgtactcgagctcctcgtgcgtggtgaccttgtggatgtggtccggccacacgaagccgtcgtaggcggcgttgtagacgggcgtgaagagcaggatgtgcttgaagcggcgcacgagcgtgcggaagagcgagagcaggtaggcggtcttgccggagccggagccgccgacgagcgccatcctgaagggcgcctcgatgagactctcccgcttgaagcgcacctcctgcacgacatccatcgtatatttactgtcactaaattaccggctccgagaaatatagaaattagagcctcctagagcacaccgaggcgcatcggcaagatggcacataacacgttcgaaaacgatagcgagtcggcagctaacaaccagtacgtggcgtcagtcaagcgccagaaaatgattcggcgatacattaagatgttcttccggttcgttacggcgatagctatcattgtcctggctattctagttgtgattctgtcgctatctctagacgaatgtctgcacagagaacaccctcatgactattcacatgtacaaaattcaacatgcgacggcattactttaggtggtgaaaagtgtctcagacttaatttgccagcaacgtgggaagatgctaatagacaatgtggtaatcttgggttttacctaccatctactggccttgaaaagaaatttccttggcttgtgacctatctcgacggaacttggggaaacactcagaactccgtatttggaccaaccggtgacttgcagaatgtcataggaccgaaagaatacaaatatttttgtgtgtccgattagatgattataatctaataaatgggttgctgtaaggtccctaaccgccagtctataaggactttgaaaaaggcgtcctgtccggtcgccagtctcgtcaccattctctccctagtcaccagcctcggtgcgatagtcagatacaccaatttttttctaaaagaagcatgtgacgaaggatggatgcccataaaaaacatatgcattttaaacacgcactttgaagccaccaatgacgatgcccacaggatatgtgaaaacctagacggaaagccgccggccatccctaaccctactctgttaaagggtgtcacagttctcaccggcgaaaagaaattttggatgacccatcacgaagactatactactgtgtttgagcatatagacgataggacgactcctaaaaacacagactatgacagtaaaaaacacacttgtttgatgagcgaggacggattgatacaccataactgcatgatgaacgtgactgtggtatgcatgaaggagatgcacggataactgaaaatatactgtttgaacgcaaagacgccatgtcgcgacttcaaatactgacctcatttggacaaatcttcgcacccgacgaagctcggctgcgcgagatcgcgcgtgatttgggaatatgcaccataaaacgcgcattcggcgacatgctgtacggctttatagacttcgacccggtgcccctgacccaagtaaacatgctcatgtccaactgctacttcgcggtcaacggcaacctgcttccgtgcacggaggacttccggctcagactcccggcaacggagatctctgcggcctacctgacgagaacgggacggacgatcctgtgcggcaaagacttcaacatagtagcgccgtcggggttcaagccgtccatgcggctgcgcgacctcagtcacgtgtctgcgcttgtagagatcctggaagtctacgacgagtccggggagtaccaattcgtgctcggccccagcgcgcagttcatgctgcggctgatggagaaggagaacgtctgtctgttcggcagcgggtggtgcatagtggacctgcgcaagctggacgtacccatataatcagcatccttgtttttatcctgtctttttatcagttttttagctagttaaaacataaatagtaaagctaaaaagaggagttctggagtcttgcaacaaccaggatgaaggcggtgttgttgctggcgttactgggagcgttcaccaacgcagcgcctttgttagaaagccagcgttctaacagtgaggaaaaagcaaatttctgctcgacgcataatgatgaagtgtacgccaggttcaggcttcagatgcgcgtgggtgtacgacacagtccgctctacactcccagcaacatgtgcatgctggacatagaagactccgttgaggacatagaagagtccacagaaaaagaatacgcgtctacggccacgggtgaggcggccggagtgaacgtgtcagtggcactagtgggagaaggcgtgagcataccgtttagttacataggccttggattcaacccgtcgcttgaagatagctacctgtacgtcaacgtctcgtcacgagctccttgggttaaacagacttcggacctatccgcgaacggcggctggggtatcaaacaggttctagaaaaagagttactggccatccaaatagggtgcgacaaccaaaaatttcccgaagaacccacaactacacccccctcacctgtcactacaacgctttcctcaacaactccagatctgaatgaagaaaacacagaaaatacgccgacgaccaccggcgccagtgtagacagaaagcgcaatccagctgacattgacttctcgctgctcgtggacccccgatgcgtgacctctgtagacctgcacgtcgagctcagggacgcgtgcatagactacaaacaagagtcgccgttgtcgctgaaggggaaatatggagacggcgaactagtaaaaaaggagattaaagacgtgggaaagaatcacaatatgtgcagtcttaacctcaaccctggcaattgagctgtttttattcggcaatataataggtgattattgaacattaaacaaaacttatcccacaacgccgcaacaatggaagtgctggtgatcatctctattatcgtcgccgtaatatgcttgaccggagcggtaatgtacctccttattgaactcggcttagccgccgagcgcgctaacaaacgcgcgcgcgtgaagaaaaatatgcgcaaattagccactcaattgggaaatggatctgtcgactccggcataggcataggcccgtgcataatgtcgcgcaccatggactctggacccagtcgctgggacagcgacagtgaggatgacggggacagcctgtccacgacgtccaccagcggaggggggactctcacccgagtgtgggttgggagcgccgggcctatgtacgaaaacttctgcgggaacggcacccgccactcccccaccaacgaccctggctaccactcgcgggagactctctgcagcggacctccccgtcaggcgccggcgctaccgcccaccccgaagcccgacgaggtaacggtggacgtggggcccggtcccgacgaccaacacggtccgtacgaggaacctgatcccattcccccgcaggaacccgagccgccggtgcagattgaggtaaccatcaacgggcccggtggagaaggcgaggcggaaggagaatttttctacgacgagtagccgccaaaactgaataactatcgggcttcgtaaacgcgcagacatgccgctgttccggaagctcatggtttcgcgctccctggtcaaggaatgtctgactctggacttccggcagggcgagcgtctccctacgcgatgcttcctcccggtgcccgcggggacgacattccacagagtctgcgacacctcgccgctgacggacgaagtctcccggcacgtgcaggagcccgtcatgggcaccggacgggtccagtactactacttcgagagcggccagggcatgatcggcgacaacgcgggcatggcgcgcatgctcgtgtgcacgcggtcggcgtacaacggcggcgacgtcgtcgtgcggtccacgcggagcagagcagacaagaccgtggtcgcgccctgccagggcatggcgctgctgctgagccccttctgcgccttcgacatcacgccggtcgagagcggctccgcgatattcgcggaggtcatcgtcaccgcgcccagcatggactacgtcgaggcggtcaccggcacgggcgaggcggccgtgcggatattcaactcgcaccacccgctctggccgcgacacggctcgaacgtctgcttcgcgctgcggttgctgcgagacgtgcgcacgggcgagcgcgtggtcgagcagatgttcatggacgggcgctggcacaccgtgctgaggacgtcctgcggcaacaaggtctgcgtgcccgccgacctcgtgggccagacgaacctcgaggaggtgcccttctgcgacgtgacgcccgagatcatgcgccgcgcgctggcgatcgacccgccgtacgaggccgtggcgcacccgcaccgctgcgtgtacggcgccatggacgtccggtgcgcgaacgagtacctcgtgtactgcaccttcaagacggagccgacacggcgcagcacgtcctcgccgggcccggacagcccgctgtcgcccgcgactccgtcgacctcgcgggccgcggccgcgcgcgtccccacgacgccgcaggaagtggcctcgccgaccacgaggctcctggagacctgtctgcgcgacgccctcgacggactctgacccgaaggacccaccgtccactcacattccactgccagacaactcaagctttttctgcatctacctcgctaataattgaattgttataggacaaacaggcgcactcgagcacaatggcgtgttttatcgaattgttagactccatcttcaaccgacgccaccgtaatttcgggccggaggacatgtacaggccctctgacgccccgccccccaaatcgcacacgcctcgcactccccgcaccccgcggacccagtgtcccggacacccgcggcgacaaagctcctctcccatctacggcgcttatgtggactccctgccgaggaacagaaagcggttccagaatcaacacagttgtcccggagattacgagcggtgtcaactctcggacaccatcagcctggatgcgacgctactcacggttacagtgacgtccatctccagcatatccagctctagtagctcagactctatctctctggggcagtgcagactgtccatggtgtccgcaacatcaacctccacctccacaaccttctcctcctcggaatgagcgccacacttatttttgtataatagtttgtattgaaccttagagacatccacaaatagttaggaagcatgagtagttcaagtagcgagaccacccctaagcccaagcccatccctgctcctcccatgactcaggaggagtttaacaaagaagtgaagaaacgaaaagaacagaaaaaggaaaaatctagaaccgttgaacgtgagtcagaaaccgtaactgtatcttccgacggatcagagataaaaaagacttacgagcgcgagtctgagagaacaaccgaaacagaaaagaacaacacgtcaaccgatgataataagcagaacacccctgtagagaaaccagaggaaaccaagcctgcttctactcctgaaggtgtgaagccagccgagactcctgccccgactactgacccccaacctactacacaaccacccgcagaatcaaaccctggaagtcaacccgcacctgcttcagaaccaacccccgcacctgagcctgcaccggaacccactcagcctgcatcagtaactcaacccgctccaacaccagagccaagtccagcccctaagcctactccggcttctgaaccaaccccagcatctgagcctacttctgctccagaacctacaccatccgcagaaccaactcctcaaccaactgtagaaacaccaccatctgctccagcaccaactcccgaggcccaaccacccgccaacagcaatcccactactgaaactaccactggtaccagcacctcctaagtgagtacgtaagcatttcggagtaacgtcgtagcaagcgctagtccgccgcgagcggttctcgcaagttttttcgggtaaaaagcgtacaccgtcgccttgtcgcggcggtgtacgcttttttcacgccctttttgcaaaatttaaattgtacccgcgccggctctaggaaagatggcgtgcctcagagtgttcctggcggtgctcgcgctgtgcgggagcgtgcactcggcgcaatggatcggcgagcgcgacttctgcacggcccacgcgcaggacgtcttcgcgcggctgcaggtgtggatgcgcattgaccggaacgtgaccgccgcggacaacagctcggcctgcgcgctggcgatagagacgccgccgagcaacttcgacgcggacgtctacgtcgccgcggccggcataaacgtcagcgtgtccgcgatcaactgcggcttcttcaacatgcgccaggtagagacgacgtacaacacggcacgccggcagatgtacgtgtacatggactcctgggacccttgggtgatcgacgacccccagccgctcttcagccaggagtacgaaaacgaaacgcttccgtacctgctggaggttctggagctagcgaggctgtacattcgcgtgggctgcacggtgcccggagagcagcccttcgaggtgatcccggggatcgactacccgcacaccggcatggagtttctccagcacgttctacggccgaaccgccggttcgctccggcgaagctgcacatggacctcgaggtggaccaccggtgcgtgagcgccgtccacgtgaaggcgttcctgcaggacgcctgtagcgcccgcaaggcgcggacgccactctacttcgcggggcatggctgcaaccatccagatcgccggccaaaaaacccagtaccgcgccctcagcacgtatcgtcgccgatctccaggaagtgcagcatgcagacggcgcgctaagggcgctcaccgcgctgacggcggccgtggtgtgcgcgatcgccatcgcgctcgagcgcggggcggaggccgacgccgtggaccttatccttataaaattttcaatgatatgctagtttttatgcgaccttccttagaaaattcggaattcaaaaatgaaataaaacggcgtttagcacgcatattattaataccgaccaccatggcaggcgtccgcagctgccagaagaaagtcccttctactgcgggctccatgtcatttcaacggggcaaccggagcatccagccggcgatgtccgaggcgttgcagaatgatttcagctacaacccgcgaccgcctccgccgagcgcagaagagattgacttcttctgcgtggacatgcgcaaagtactgatggaaattgaggccaagcccagcagctccaagtaccccgatttcatcacccggttgacagcagcccgccgtgcacgccggcgcgcaagcgcaacggcttcggccgcaaggcactgaacaaaacccaggtgccgcagcaggccaagcgtgacggctactcccgctaatgcagtccacacacttcacacactacatcagcactcaagcttataatcactacacaatgaatcagcccaccacgtgcgaagcacacacataaaatcacccacctgtcctgatcgttcccaatactcccaatcaccgtgctttacacgcacgttaatcaccctttccttccttcatgcgttcctgatcgttcctcctccttaatcacacacacaccccgtaattttgtacttttgtactttaatttgtacactttacacactgactttgtactgcctttgtactttatttttgtactgaaattggacgatacttatctttgtattcacatccaagttttgcaaattccacagccggtagcgaaaagtgaaatcgtaccgttttaggcttcgatccccctcccgcgcgaagactcgccagcatggactctcgtaggctcgctcttgccgtcgccttcggaggcgtcctcgccagcatgacacagcgccgccgcctggcttctctcatcgccagcatcggccaacggctgatgggcggcgacggcatgcgtcgcgtcgccgttcggttgatcgaccagctcatggccggacccccggacatcaacgacgaggccttccagcgcgagatccgcgtgggcgagctcttccaggcgctccaccgcgtggtcgagcaggcacgccgagagaagtacttcgaggtctgcggcgccggcaacgacgccgacgcgcccgtcgtcgagatggacaccgcggccgcacccccgcagccccagcccgcgcccctcgtggtcacgccgcagaacgcgttcatgttcgtgccgcaaggcagccacgtgcacgtggacgagagcgtggacccgttcttcggcatgagcccctccatcttcgggcgcgacctcccccctcagccgcccgaggagctgctgagcgactacgacccgctcatgagccaggccggcgagccgccgagcccgcggtcgccctgcgaggccgacctctggtgcttcgagacgctcggcgacagcgacagcgattgagaccgcaccacaccctacctcacccaccccacactccacctcacctcaccctaacacccaacacccaacacctcaaccggacaatgaaggagtcccacatttcactgaaggacgcggatgaagccgcactcccccacatgaaggattggcaacggtcaaacatttcacctgcaatgaaggacgatgcgcggtcgcattggcctgcgaccgacatcgcacacatgaaggacacaattggtttgttaatccggacaatgaaggacaaattgtttttgttaatcaggacaattagaacacaatcaaatttttgtacgatcataaaatcgatatttgatgcacatatattagtaagtatattagactaaattctccggggaggcaagcagttggatacggcggggcggggcacgacgtgcacggagagttcgggcgggtcccccttccccccacccccacgcaccacgatgcgcctaatcttagcgctcgtggcctgcttgttggcggcgccgatgccgttatcgggtcgttcgacaagcactccaaacacgtccccctccgcactcggctcgacgagttcggaaccaagctcggaagacgctgtggcttcgagcacaacgacaagcacactcacaagcactacaagcacactcactatgtccacaagtgtggacaccactactacctcgggcgctacaacgtccgcaaacagcactcctgcagcgagtgtgagctcctccacacccgcaactaccgaggcatcgacggcaccaacgacgccgtcgacgccgacgacagtgaaggtaacgaagggcaaggaagacacgaaggcgtctgcctacctcgttttactaatcacgttcatggtcatgaccacgctcgtgatggtcgtggtcgtggtcgtggtcgtgtacaaacagggactctgtaactgctgctgtaagtttccctgctgcaaagagctcaaggactacctcgacgaggaggagagcgccgggctgtacgacgccttgacgtggagccactcagactccggcctccggctcgtcgtgcgcgcggaccccagatgatgaggatcggataagatcggcgtgtttttcccgcccgtcgcgaacattatgcctctaaatgccgagaattaactgaaattcaaacacgctttgggactcaactccgtgacccacactcaaccatggctggcttcctaggcgcattcagaggcgtgtgctccgacttatggcagtcgctccgtggacacggacaccactcttccagctgcccgcgacgacgcgccaacagcatggacgaccgcgaccggcgccgacaccgccaccgcgagatccccaacagctcggcgtcgctgaacagcgacccgatgccgcaacgcagtgcgggtgcgcgccggcactacgactgccgcccctcggaaaagagcagacactcctccgacaagcaccactcggcggaccgacaccactcggcggaccgacaccaatcggcggacagggacagacaccgtcgcagtcgcaagaactacgactcgcacccgtcgcgcaggaaccgcaactacgagcgggcggactaccagagacacccctcacaaacccacccagacgcccccgcgcagacctcgacgctcaaggtgacctccctaagcaccagctgcagcaccctgtcccaacatcactacgagacccccgaccacatctacgacatcccggaagacagtcgcggggcgtcggctccccctcgcgcggacctcgcgctccccccgctcgccatgcccaaatccaagccgcgtcgcacgcgcccggcgtccatgaacgactgcctgatgaagcactgcggcgccggcagacccaacctccaagacgacatatgcacactatgtactgatatagagacacagctgagcgcactagagaagtctctggagtcagagctcaacttctatcgtcgctacatacaagacactaagacattgctcgccacgcgagcagcaaacatcggcagcaaagctctgatctacaccgacgactacaacggcagtggcgacgtcggcgaaaaggagcactgctcggaggagtgctgcaaagtggaggaagttctgtgagaaagtgcgtttttctgtaatgtgaaataagatagccttatgtgtgcacagacatggcgaacaggctcgtgtttctcgaccccgagaccctagccgaggccgacggcatccccggctatggggtgttcgagcccggcaagaagaaatgcatcttcacaaagatccgcaccagcgtcgcactcgcgtgccggtacgccgtctcggacggcggcctcatcgacgagttcgtcatggctacatacgggaccagacgcgcgtgccggctcgtccggcacctgacgataggcgcggagggcgtgatgacccggcccgccagcaactgcgcgccgcacatggtgctcatctgcctcagaggcgtggccgccgtgtccagcgaggacatgggcttcggtcgctgcatcatggagcgcggcaccatgttcatggtcaagtccgcgcacagcgccgtcgtctgcggcaaccccgcctgcgagctgctcgtcctcttctacgactacttcacccccatcccccggccgctctccggagacgaggtgctgttcacccgcgacctcgcgcacgtggactacgcccccgagtcggcggtcgtcttcaagatggattacaacctcgagaccgacgtggccacgctgtttgtcggggggtacatattccgcgccaagggcctgatgatggagacgcgcgaacaagtgggcgacgagtgcgactgctgccgccacagctcgccggtgctcgtcatggatcgcgagaagatgatgtcgtcgctgcgcatgatccccagcatcgtgcccggccagcgggagatttggcttcgcgagcgcggctgggccgtcctcgagacggacgcccgcggacactgcgagcccggcgtcctgaggctggcgctcgccggcctgcggctgttcgcaggatgcctgcgctccgtcgtggggcggcgcgagctgtcgctgttctgctacggcgtcgctcccaagttcggcggggagttcgaggacgcgccgcgccccatggagatcgacggttagttgtttttatccctgtacatacgccgcaaactgaaactttagggcaccgcgtaatagtgcacgaacgcccagtggaccgcttccgcagccatggaaaacaacgacggcaacgaacgcaacaacgaacacccgcacgttcgagaattcaaggaggcgtccctgtacgggtttctggtggcggccgcggacgtgaccgtcgaagacgtgcaccggtaccttcagttcggcgcggacgtgaactacaggggcgcgtacctgtgcacgccgctgcacgcgtacctgcagtccggctgcgaaaagcgcctagacgtcgtggacgcgctgctggacgccggcgcagacatcaacgccaaggagatctgcggtctcacgcccgtgcacctgtacgcgagctacgcggacgtggacgtagagttcatgcgcgggctcatcgagcgcggcgcgagcgtgtgcggcgagagctcggtcacgggctgcctgtactcgtacctgtacacacacagcgtggacggcggcgcgcgcctggacgtggtcgagctgctcgtgcaggcgggcgcggacgtgaacgtccgcggcgaggcgcgcaagacgccgctgcacgtgcactgcgcgggcttcgaggtggattcggacatcgtggatctgctgctgcgcgcgggcgcggaccccgaggcgctcgacgaacacgggctcacgcccgcggacgtgctcgtgaagtccgtgggcgccaacgtggagacgctgcggctcttcctcgacgcgggcgtgagcgtggccacgtcgcgcgacgcgcgcggacgcacgccgctgcaccaccacgcagactccttccgggcgagtgcgggcatcgtgcgcgaactgctcgccgccggctgcgacgcggcggccgccgacgacctcggaaacacgcccctgcacagcctcgccaccttctgctcgtgccggcgctcggtgctcgaccagctcatcgccggcggcgcggacatcaacgcccgcaaccactacggccacacctgtctgtactacgcgtccatctacaacccctccgtctgctcgcggctcatcgccgcgggtgcggacgtgaccgcgcgcacgccggacggacgcacgccgctctcgggcatgatcatgcgcaagcacacgcgcgccgtgcgcgccgccctggcgacgcggcctcccgcggacgccgtcgccgcgtcgctggacgtcgcagtacagcccgagcccacggacgccactcgcgcgtgcgtgcggtacgtggtgctctgcggcggcacgctctcggcgcgcgtgcggtcgcgacacgcggacttcgtgcgagagtgcgaaagcgaggtggtcgtgctcagaaccaccgtggtggggctgcccggcacctcgctgctggacatcgtgcgtgcggcgcagccgccgccggtactgctctccccgcgcgtgcaccacgtgctgcagaagctgtgcgtgtacgcggagttggtggacgcgcggctgcgcgagatgcggcacaagaccaacctcgtggacgcggtgtcgcggctcgtgtgtccgtgcgcgctgccgccggaggtggtgcgcggcatcctcgtgcacgtgccgatagacagcctgcggcacacgttgaccctcggcgtggcgcaggcctcgcgtttccttccctcgcataaatgaaatattattttttgtggtagaccggatctccccgatggaccccgccggacaacgactgcgcgcgccagggccgtggcgcctgaacccgccgaccgcggccgcgctggaaagcgcgctgctgcggcccgcggcgtcggcgggcgccgaccgctgcgcgaacgcgcacgtggaccgccgcaacatgggcgtcggcgagggccgcgaggtgcccgcggacgtcgaggggctcatgaccgagatccacctgcggtacggaatgacgcgcgtccaccggaacgttcacttcgtgcagttctggcacggcgagcacgtgcgccggcgccccgcgcgacacgtgttcacggtctggatctgcctcagcggcgaggtgcgcatctacgcagagtgctgccaggcggggcacggcttcgtgctctgccgacagatggcggcagggtacatgttcgtgaccgaacccacggactcggtcacggtctcggtgccgcaccgactgcgcaactcgcggtcgccggtgtggctggcggcggtcttcgccacgcggcacttcgagccgctgccgccgcccatgtacgccgtgcccgggcacgtggtgctcgcgcgcagcgcctccatgctctgcgactgctggccgtcggacccgcggcgccgcaacgtgatcttctacatgcggctgtcgggcgcgatggtgcgcgtggtcgtgccgggcgcggagctcgagatcgagtgcacctcggggttccggccggaccacttctccatcaacgacgagtgcgtgtgctgcgagcgtccgcacgtcgcgcgaaccgcggtgtggacgctggcggagatttgccgcggcgccacggtggtgctcgcgccgccactgccccgcgaccgcgccgcggggctgctcgcggagatccgcctggcctcgctgcgatgggtgcgcgtgcgtgcggtccgcagcggcagagaaagcgtgggcccgttcccctcggtggtgtgggcggcggtcttctccgccgttcggctcttcctggacggaaccgtgcctgccttcccggcgtgtgtggagaatggacgcgcggcgtacggcatggtgtacgtgcccccggaggagccgcggatggacgggctctgtgtgttcccgacgcccgccgagccggcggcgctcttcgtccgcggagaccaggtgcttgaggccggcgcggccgccgccataatcgcggccgctgagaagcgcgtccaggccgccaatgggtctcctgctgccgcggaggaggacataggtgcggcggccgatgccgccgcagagagcgtggagcaggaccagcgcgtcgagttcgaccttgggcctgggcctgaccccagccaagaagcgcccgcggacgcgcagcgtgccgattcggacgacgacaccggctccgagaccgagaccggcgacgagagtgtgggcggcgaggatgacagcgactcctcctcctcttactcggtgatgtcggacgacgaaaacgacagcggcgacgagggctggggcgactctagcgactccggcatcgaggacgacgacggcggtgtcggccaggccgccgaggaagaagaggaggaagagcgcgacgtcctcggcgcagcggcccagatgctcggagactgaccggtggtgaaaacataaaaataaactgttcaacacttgtactccgggcaccaacactactatccatacccaccctccctccacacactacaatggcaaacagagaagagattgacgcctccgccgtcatggctgcctacctcgcgagagagtacgcggcggctgtagaagaacagctgacgccgcgcgagcgcgatgcgctcgaagcccttcgcgtttccggcgaggaggtccggtcgccgctgctgcaagaactctcgaacgcgggcgagcaccgcgccaaccccgaaaactcgcacatccccgccgccctcgtctccgcgcttctcgaagcccccacctcccccggccgcatggtcactgcgattgagctctgcgcgcagatgggccgggtatggacgcgcggccgccagctcgtcgaattcatgcggctcgtgtacgtgctcctagaccgtctgccgcccacggccgacgaggacctcagcacctggctgcaggccgtcgcgcgcgtgcacggcacgcggcgccgcctgcaccgcgttctcggcgtcggggccgtcatggcaggcgtcggtatgctgctgctcggcgtgcgcgtgttgcggcgcacataactttttatctcggctcaaactgaaatacgacattggactacgaaacctatgattttgctcacggccgcgcgagataggataataaataacctttgagcaactaacatggccgatgagagagaggccgacggcgcgctgttccggtacctggagagcgaggaccgtccggacgtggagcacatgcgccggctgctggacgagggtgcggacgtgaactacgcgggcccgcgcgggtacgcgccgctgcacatgctcatgcgcggcaacccgctagaccccgacgcggtgcgactgctgctcgccgcgggcgcggacgtgaacgcgacatcgctctgcgggttcacgccgctgcactcctacatgtgcttcgggaccgtgacgccagacacgctgcgtgcgctcatgcgccacggcgcgagcgtcagcgacctcgagcgcaacatcaacgcgctgatcgagtacttcaaccgcgacggctgcatgggcggcgcggaggcgaccgtgatcgcactgctggtggagcacggcgcgcacgtgaacgccaaagacgaccttggacgaacgccgctgcacatctacctgtccggcttcttcgtgtcggcaccggtggcgctcgcgctgatcgcgctcggcgcgaacccgaacgccacggacgcgtacgggcgcacgccactgcacgccttcctgcgctcccgcgacgtggaccccgctgtgctgaagacgctcatcgccgcgggcgcagacccgctcgcgcgcgacatcatccggcgcacggcgctgcactaccactgcgagtccttcaagacgcgcgctagtgttatagagacgctggtggccgccggctgcgaccccgcgagcacagacctgctcgacaacacggcgctgcacagcatggccatgggcagctcctgccgcgcctcgctgatccgcccgctgctggccgcgggcgtgtccgtgaacgcgcgcaacgcgcggctgcagacgccgctgcacctcgcggccgtgttcaacccgccggcctgcgcgcggctgctggccgcgggcgcggaccccgcgctcgcggacctggacgagacaacgccgctgctgagcatggtgcggcacaactgcgcacgcgcgctgcgcacggcgctgcccttggcgccggacgcgctggtggccggcgcggtgaaccgcgtgaacgcgcgcacgccgagcgcggccacgcgagagtgcgtgatggcgctggcgctgcgcggcgcgctggacctgctgagcgcggagagcgttgccacccacgcggccgcgatccgcgcctgcgaggcggaggtcgcgctgctgcggcgcacgcgcctgggcgcgccgccgacgacgctcttcgcgctgctgacaggacgaccgaacacgctggtttccgcgaaggcggcgcgacgcgcgatggcggacgtgtgtgtctaccgcgcggcgctggccgcgcgcgtggagcgcgtgcgccgcaagtcctcgctggtcgagcgcctcaccgccatggtgtgtccgtgcgctctgccgccagagctagtgacgcgcatcctcgcgctcctgaccgtggaggaactcgcttgcgcaatgcgcaaataataatgaactataactaggcttattagaggcactatttgtgcagagtcgttagttatagttagtgtacttacaattggaatgtcgaagaacaaaattctggtgtgttttgtaattattcttacttatacattatacacagatgcgtattgtgttgagtatgaggaaagtgaggaagataaacaacagtgcggtagtagtagtaattttcctgcgagtttaccgcacatgcttagagaactcagggcagcgttcggaaaggtaaaaactttcttccagatgaaagaccaactgaacagtatgctactcacacagtcgctcctcgacgacttcaaaggctacctcgggtgtcaggcactttctgagatgatacagttttacttggaagaggtgatgccgcaggcggaaaatcacgggccggacatcaaagagcacgttaactcgctgggagaaaaactcaaaacgctgcgtcttcgactgcgtcgctgccaccgcttcctgccgtgtgagaacaagagtaaggccgtggagcaagtcaaacgtgtgttcaacatgctgcaggaacgaggtgtttacaaggccatgagcgagttcgacatattcatcaactacatagaatcatacatgactactaaaatgtaaaaatgtatacaacttttagttatcgttcggattctcgtatcgttctgcatactatgtatataaaatgtatattaacatagttacagttacagttacagctatatttttatgctcacaagatgctatataattgaaaggaaattgttcactctctgtcagggcgccatggactttctaggcgccgcgcttcacgactacgttgccgatgcgcccaaggtctgcgccgaggaggtgcggcggctgctggccgcaggcgcctctgtggagtacgcgggcgagttcgggaagaccgcgctgcaccagtacatgggccgttccggcgcggaccccgccgtcgtgcgcgcgctgctggacgccggcgcgcgcgtggacctcccggagacctgctgcggctgcacgcccgtgcacctctgcctcatggccgccaatatcgacgtggaggttctccgcatgctcgtccacgagggccgcgtcgaggactgcggccgcgccgagctcgcctccgtggtgctcaaggagttcgtggtgaaccgcgccttcgacgagaacgtcaccgagcgagtgatgcgcgttcttgtggccgcgggcgcggacgtgaacgccgccagcgtggtcgaccgcacgccgctgcacgtctgcctcacgggcatgtccacgcacccgggcaccatcgccgcgctgctgcgcttcggcgcggacgtgaacgccgtggacctctgcggcatgtcgccgctggcggtgctcgtgcgctcgcgcgcggcgaccgcagagctggtgcgcatgctgctcgacgcgggcgcagacgcacacgctgtcgacagtcgcctggactcgctgctgcaccagcactttcagtccgcgcgcccgcggccggaggtggtgcgcgagctcatccgccacggctgctcgccgcgggcgcggaaccgaatcggcaacacgccgctgcacgaggccgcaaaacactcctcctgcaaacactcgctggtggggccgctgctggctgccggcgcgagcgtggacgcgcgaaataacacgggcaggacgccgctccacttggcggtggcgtccaacccgcgcgcgtgccgccggctgatcgcgcttggggcggacgtggtcgcgcgcagttacgcgggcgtcacgccgctggcgcagctgatcgcggacaataactccgcgctggtgaccgcggcgctgaacacgcagcccgagccgcgggccgtggcagagtcgctgcgagcgaccacgcccgtcggcgagacagcgtgctcgcggctctgtgtggcgtacgtggtggcgcgcgcgccgagcgaggtcctcggcgagcccgagcgcgccctgcacgcggccttcgtggcggagtgcttagcggaggtagcggccatacacgccgtgcgctgcggcacacctccggtctcgctgctggagatcctggtggccgcgcgcccgccgcggagcctgctctcgcgccgcgcgtggcggctggccagccggacgacagtttaccgcgcgccgctccgtgcacgcatcgcggccatgcgccatcgctcgcgactggtggagcgcgcgctgcgcacgctgcgcggctgcgtgctcccgcgcgaggtgctggagcgcgtgctgcggtgtctgtccacacaggacctgcgggcctccggactggccgagtagctttttctgagataagtgaataaacatggtgggattcgatcgcgccgccaacgccacgccatggacgccgccgagatggaggatctcgacatcaacgcggagtcggcgctgtacgactacttcatcctgaacgcggacagagcccgcgtgggcgaggtggttatgcttctcgcacagggcgcggaaataaactacgcggacagcttcgacaagacgccgctgcacctgtacttgcacacgcgacacccgcgctcggacgtgattctggcgctgatggaggcgggcgcggtcgtggacacgccggagcgctgctgcggcgcgaccgcggcgcacctgtacatcctcaacgcggccaaggtcgacctgtcggtgctggaggccatgctgacctggggcgtgcgccagaacgaccagcactcggagcggctgctctcgagcttgttgcgcgagtacgtggtgacccgcgcctactcggatcagaccgagccgatcatggacttgctcatcggcatgggcgccgacgtggacatgccggtcggcgtgagtcgcacggcgctgcacgcctgccttacgggcctgaacgcgaacccgtgcatgattcgcgcgctgcttcggcgcggcgccagcgtgaccgcaaaagacacctacgagatgacgccgctggcggtgctgctgaagtccgcgagcgcgacgccggagctcgtgcgcatcctcgtggaggcaggctccgacgtgagcgccaccgacttccgcctcaacggcatgctgcaccagcacgcgcagtccacgcgcccgcgcgcgagcgtcatgcgcgagctcatccggctggggtgcagcccagcggccaaaaacatgtttgggaacacgccgatgcacatgctggccatggaaagctcctgccgccgctcactgatcctcccgctgctggaggcagggctttccgtgaacgaggagaacccgcactacggcaccgtgcctctgcacgtggcctcggggtacgacaacacgcagggctgcctcaagctcctccggcatggaggagaccccaccgtcgtgtcggccgccggacgcacgccgctctcgaacatgctcgtcaaacgcaaccacgtggcggtcgccggcgcgctgtcgacgcacccgagcgcggcagtagtcgtgcaggctctcgagcaggctctcgagaacgtgctgaacgccgggcccagcgaggcctcgcggctcgccgtggcctttgtggtggcgcgcgccggcgcatccgcgctaccggaggccgtgcgccgtctgcacgagggctttgtcgccgactgcgagcgcgaagtcgagctgctttcccgcaccatgctcggcacaccggccgtgagcgcgctggtcgtgctggtcagcaaggaggtctttggcactgttatctcctcgcgtgcgctgcgcgtcgtgcgggaggtccgcgtgtacgcaaggccgctccgcgaggcgctcataaatctgcgccacaaatgccgcttagtttccagccttaaaaggcaggtgggaccttgctcgctgcccggcgaactggtggagcgcgtgctcgcgaccgtgccactgaccgacttgcgccgctcgtgcggccgccgcgcgcccgagtaactgcccgtcccgttgctacgcgactcgagactgcccgctgtttttctttccccgtttcttcttattaggagttgttgcccgcctccatgatcctcgcacgcgccggcgggcaacctcgcacgcccgcggcggccgcggccgccgccgaggacggcgagcacagtgatcgccggaagcgcaagcgcaagacgcccaactgcgaagacgccgacaactccgacgacgagctagcgcagacgccgtgcgaccgcgagtggccggactgtcgcgcgagctcgatcacgagctccgactcggtctctctcggcgacgagatctacctgcgatacgtggcctcgcaggtggacttcgcgcagacctgggccccgccagtgcggctgctgcgcttcttcgggaacttctcgaaggaaacgctcaaccgcatgtcgcggcgcgggtacgtgaaccgctcctacttccagatggcgcacgcgcgcttctcgcccaccaacgacgacatgtaccacatggccacgggcgggtacggcatcgtgttccgcttcgaccgctacgtggttaagtacgtcttcgagcaccgcaacggcatgtccgagatggacgcctctacggagtacacggtgccgcggttcctgcgcaataacctcaagggcgacgagcgcgagttcgtggtctgcgcgctggccatggggctgaactaccggctgggcttcctgcactcgctgtaccggcgcgtgctgcacacgctgctgctgctcatgcgcgtggaggaaggccagcggccctcggtggagatgtccaagaagccgctgctgcgctggttcgaggcgcgcaaggacagcgagtccttcgtgcgcctgatctcgtacttctacccctcggccgtgcagagcaacgtgaacctgatcaacaacttccaccacctggtgcacttcttcgagcacgagaagcgcgcgcggtacgtgttcgaccgcggggccgtgatcgtgttccctctggcgcgcgggtccgcggactcgatctcgccggaggcggcggcggcgctgggcttcgcgccgcactcggagttcctcaagttcgtgttcctgcagatcgcgctgctgtacctgaagatctacgagctcccgggctgcacgaacttcctgcacgtggacctgaagcccgacaacgtgctcatcttcgacagtgcgcgcgcgctcagcgtgaccgcggccggcgcgactttccgcttcgaggagcccgtgcgcgcggcgctgaacgacttcgacttcgcgcgcgtggccaccatcgagaaccgcaagatcgcgggcagcgtccgcgtgccgcagaactggtactacgacttccacttcttcgcgcacacgctgctgcgcgcgtacccgcacatcgccgcggaggacccgggcttccacgcgctgctctcggagctcacggtctcgtgctcgcgcgggacctgcgaccgcttccggctgcgcgtgtcctcgccgcaccccatcgagcacctcgcgcggctggtgcgccgcgacgtcttctcccgctggataaatgccgccgcggacgcccccgacgccgccgcactctcctgagcccacgcccgcggcgccgggctcgctgtacgacgtcttcctcgcgcgcttcctgcgccggctggccgcgcgcgcggcgccggcctcggccgcctgcgccgtgcgcgtgggtgcggtgcgcggccgcctgcggaactgcgagctagtggtgctgaaccgctgccacgcggacgcggccggcgcgctcgcgctagcctccgcggcgctcgccgagacgctggcggagctcccgcgcgcggacaagctcgccgtcgcgctcgagctgggcgtggaccccgagcacccggagctgacgccggaccccgcctgcgcaggcgagagcgcactcgcacagaacatcgacatccagacgctggacctgggcgactgcggagaccccaaaggccgccgactgcgcgtggcgctggtgaacagcggccacgcggccgcgaactgcgcgctcgcgcgcgtggcgaccgcgctgacgcgccgcgtgcccgcgagccggcacggcctcgcggagggcggcacgccgccgtggacgctgctgctggcggtggccgcggtgacggtgctcggcgtggtggcggtttcactgctgcggcgcgcgctgcgggtacgctaccgcttcgcgcggccggccgcgctgcgcgcgtagccgcgcaaaatgtaaattataacgcccaacttttaagggtgaggcgccatgaagttgctcgtcggcatactagtagccgtgtgcttgcaccagtatctgctgaacgcggacagcaacacgaaaggatggtccgaagtgctgaaaggcagcgagtgcaagcctaggccgattgttgttcctgtaagcgagacgcacccagagctgacttctcagcggttcaacccgccgtgtgtcacgttgatgcgatgcggcgggtgctgcaacgacgagagcttggaatgcgtccccacggaagaagtaaacgtgacgatggaactcctgggggcgtcgggctccggtagtaacgggatgcaacgtctgagcttcgtagagcataagaaatgcgattgtagaccacgattcacaaccacgccaccgacgaccacaaggccgcccagaagacgccgctagaactttttatggaccgcagatccaaacgatgatgcgatcaggtcatgcggaagaaggcgccacggagcaaagtgaaaaaggaccgcctagcagtcgagaccctcccgccgcagccgcggacaccccacacccgccttccacccgccagacgccaacaccgcagccaacaagcatgcacccctcgccgcgcaggctgctcggcgcgctcgcgctggtggcgctgggcttcctcctcggcgggctcttccgccccgcggcgccgccgctgccggccgccctcgtggaggcgggccccgtccgcgcgaacggctccgcctcggtgacctgcctgaccgtcggcggcgacgggcggcacatggcggtggtcgcgcacggcggcgggacgctctcgccggtgtacccgctcgccgccggcatgcacgcgaccttcgcctcgctgcgcaagggcgcgctgctgctgaacgtcgcgaccgtgcacatctacgacgtgcgcgcgctcgggccggagttcgagctgacctgcgtcgcggtggcgggcggctacaacgcggcctgggcggccgcgcggcccgcggccgagtggcgccgccagctggcgcggatgcaccgctcggagctgtgaccctctccctcccggtctcccatccgtttttgtaatcggccttagtagattagaccagcatcccgcgcccttgtccgccgcccttcgctcgctcacgagcgaatcagtcaattgattatttttatcgcccgcccgctcactccggtaagggaacgcggttaacccactcacgagaacaagcgaccgccactcacttgaggtaagggaacggttacggtcaactcactcacgagaacaagttgactcactcctcgaggtagagaacgagagaacaagtgaccgtactcactcacgagaacaagttgacgcaccgctcaccgaggaagggaacagagaacaagtaacagtaaccgttacctcactcgccactcctcggaataatagaacgagagaacgagagaacgagttaaccgttgctcactcgctcactcggtgtgagagaacaagtaacgttgctcactcgctcactcggtgtgagagaacaagagaacgagtagctgttgctaactcaatcacccctcggagtaagagaacaagagcagtcaactacccactcagtcttggatgagaggcagaggacgagttgacgagttgaacagttaatcctcactcactcagagcgagagagcgagagagtggaggacgagttaacaagtcaatcctcactcagagtgagagagtgagagagtggaggacgagttaatggttaacagttatcaccactcagagtgagagcggaggacgagtcaaccactcgctcgcccactccgagttagagagggaaccagtgcgagttaacgcgcacacgagcgagagaacgtaaactcgctcgcgcgctcgctcggctaaccgtcggcctctcccaaaactcttcgtaaaactttcccgatgacagttcaccctccaaaactttgtaaaactaaactgttcggaggtcggtctgctgcctctctaactctccgtaaaacgtttgtaaactgtcggaggtcggtgacccgctcaaccgtccgcgaaaacttttcgcaggcagtgtctgcctctctcggactctccgcaaacactttcgcggaacctcggagggtggtcgacctctctccaaactcttgcaaaactttttcgcggaaccgttggaggccagtcctccctccaaactctttgtaaaatcttttcgaggccagtcctcctctccaaaacgttccgcaaaatctttgggaggtcggcctctcctctccagaacgttccgtaaaactcttggaggccgcccgcggcacgcgaggcggaggatccggagggtgtcgacctccctcaaaaactttgtaaaaactttttataaaactttccgcggaacctcggagagtaggtcgacctctctcaaaactcttataaaacttttccgcggaaccgttggaaggtaggtcgacctctctcaaaactcttataaaacttttccgcggaaccgttggaggcaggtcggcctctcaaactctttgcgagaactcttcgcgagaactcttcgataactttaggaggtcaggtcgacctcccaaaacttttgcgagaactctctgtaaaactttaggaggtcggtacctccctcaaaactttttataaaacttttcgcggaacctccggagacgggccgccgcccgcgaccgcgggagcggagaggccgacctcccgagacgttccgcgttaccgtcggggtaggcgtcctctcgagaacgccaaaagacttcgtgcaaaaacttttcggaggggcgcggagggcgggtcagctcccgcgaactcccgcagaaccttttcgcgcgaccgcgaaggccggccgcctctcccacactctcaagagcttttcggaggagaggaagggcaggtcgcccccacctccgacgctttgtaaaaacgtttacgcggaacctcggaggcaggtcgcctccctcgaaaactcctcgcgaaacctttaaaaactttttgcgaaaacttttcggaggatgtcggagggcgggcggctcttccaaacctccgcagaaccttttcgcgcaaccgttggaagacaggtcggcctctctcgaaaacttttaaaactttgtaaacgcgttggcgggaccgtcgcgggagagcggccgcccgcggcacgcgagaggaggaaccgttggaaggcagtcggcctctcccgaaaactttttataaaaacttttccgcggaaccgttggaggcaggtcggcctctctcagagtctaaaaactttttgcgggactcggacggcgcggtcacccgaccacctgactcctgtctacccgactacttgacttctgtttccctgactcccgactccctgactcccgactccctgactcccgactccctgactcccgactccctgactcccgactccctgactcccgactccctgactcccgactccctgactcccgactccctgactcccgactccctgactcccgactccctgactcccgactccctgactcccgactccctgactcccgactccctgactcccgactccctgactcccgactccctgactcccgactccctgactcccgactccctgactccctgactccagagcgaggtctcgcggctgcggggtgccgcctccgcggagtcgcgttcccgcggacgcccgtcctcgaaagcattcagcagttccagcctctgccgtagctcctcccgcaggaactcctggtccgcgttctcgcggcagcgcggctcagccgccgcgggagccggccgccgccccggcgaagccgcggatccgctgttccggcgaaggcaggacagacattttttccagcccataaattaaaaagaacaagaaattacatgtgaaaaaatttgaggttgatttattgacgaaacgttcaactaaatacaatcctaaaagtttttatcatcatgataattttctgttgattctttttaatttatgggctggaaaaaatgtctgtcctgccttcgccggaacagcggatccgcggcttcgccgg

SEQ ID NO: 3 - DNA, 188455 bp, Artificial Sequence
  Synthetic Poylnucleotide
ggtttaatatttttgtgagaccatcgaagagagaaagagataaaacttttttacgactccatcagaaagaggtttaatatttttgtgagaccatcgaagagagaaagagataaaacttttttacgactccatcagaaagaggtttaatatttttgtgagaccatcgaagagagaaagagataaaacttttttacgactccatcagaaagaggtttaatatttttgtgagaccatcgaagagagaaagagataaaacttttttacgactccatcagaaagaggtttaatatttttgtgagaccatcgaagagagaaagagataaaacttttttacgactccatcagaaagaggtttaatatttttgtgagaccatcgaagagagaaagagataaaacttttttacgactccatcagaaagaggtttaatatttttgtgagaccatcgaagagagaaagagataaaacttttttacgactccatcagaaagaggtttaatatttttgtgagaccatcgaagagagaaagagataaaacttttttacgactccatcagaaagaggtttaatatttttgtgagaccatcgaagagagaaagagataaaacttttttacgactccatcagaaagaggtttaatatttttgtgagaccatcgaagagagaaagagataaaacttttttacgactccatcagaaagaggtttaatatttttgtgagaccatcgaagagagaaagagataaaacttttttacgactccatcagaaagaggtttaatatttttgtgagaccatcgaagagagaaagagataaaacttttttacgactccatcagaaagaggtttaatatttttgtgagaccatcgaagagagaaagagataaaacttttttacgactccatcagaaagaggtttaatatttttgtgagaccatcgaagagagaaagagataaaacttttttacgactccatcagaaagaggtttaatatttttgtgagaccatcgaagagagaaagagataaaacttttttacgactccatcagaaagaggtttaatatttttgtgagaccatcgaagagagaaagagataaaacttttttacgactccatcagaaagaggtttaatatttttgtgagaccatcgaagagagaaagagataaaacttttttacgactccatcagaaagaggtttaatatttttgtgagaccatcgaagagagaaagagataaaacttttttacgactccatcagaaagaggtttaatatttttgtgagaccatcgaagagagaaagagataaaacttttttacgactccatcagaaagaggtttaatatttttgtgagaccatcgaagagagaaagagaaagagatagttagtctagatatttttcttagtacaaaagtcaatgttttaaaatatatggacaagaatttgtctgtataaaaacttgtgtgaaattttgtaccaaagaaaaaatgtgagcagtatccctacatggattttactagatcatttatatacaaaaaatattatacgatctacgttttattatatgattttaacgtgtaaattataaacattattttatgatatacaattgtctggtaacctagatgggcataggggatgttgataagctcgacgagtatatgttgttggacgttattgtttaagaaatagttgatgcatcagaaagagaataaaaaatattttagtgaaaccatcgaagagagaaagagataaaacttttttacgactccatcagaaagaggtttaatatttttgtgagaccatcgaagagagaaagagaataaaaatattttatgactccattgaagagagaaagagaaaatgagaatgagaataaaaatattttagtgacaccatcagaaagaggtttaatatttttgtgagaccatcgaagagagaaagagaataaaaatattttatgactccattgaagagagaaagagaaaatgagaatgagaataaaaatattttagtgacaccatcagaaagaggtttaatattttttatgagaccatcaaagagagaaagagaataaaaatatttttgtaaaactttttttatgagaccatcaaagagagaaagagaataaaaatatttttgtaaaactttttttatgagaccatcaaagagagaaagagaataaaaatatttttgtaaaactttttttatgagaccatcaaagagagaaagagaataaaaatatttttgtaaaactttttttatgagaccatcaaagagagaaagagaataaaaatatttttgtaaaactttttttatgagaccatcaaagagagaaagagaataaaaatatttttgtaaaactttttttatgagaccatcaaagagagaaagagaataaaaatatttttgtaaaactttttttatgagaccatcaaagagagaaagagaataaaaatatttttgtaaaactttttttatgagaccatcaaagagagaaagagaataaaaatatttttgtaaaactttttttatgagaccatcaaagagagaaagagaataaaaatatttttgtaaaactttttttatgagaccatcaaagagagaaagagaataaaaatatttttgtaaaactttttttatgagaccatcaaagagagaaagagaataaaaatatttttgtaaaactttttttatgagaccatcaaagagagaaagagaataaaaatatttttgtaaaactttttttatgagaccatcaaagagagaaagagaataaaaatatttttgtaaaactttttttatgagaccatcaaagagagaaagagaataaaaatatttttgtaaaactttttttatgagaccatcaaagagagaaagagaataaaaatatttttgtaaaactttttttatgagaccatcaaagagagaaagagaataaaaatatttttgtaaaactttttttatgagaccatcaaagagagaaagagaataaaaatatttttgtaaaactttttttatgagaccatcaaagagagaaagagaataaaaatatttttgtaaaactttttttatgagaccatcagaaagaggtttaatatttttgtgataccctgaaaggaaataggaataggaataggaatagtgtcataatcgtatcacactattgagacagaaaaagaagaagtcgcgagaggtaactttttgtgaatgtagttaagaacatttttgttttgcaaaccggaatatagtgtccggtacacttttttaattcgtggtgtgcctgaatcgttcgattaaccctactcatccaatttcagatgaatagagttatcgattcagacacacgctttgagttttgttgaatcgatgagtgaagtatcatcggttgcaccttcagatgccgatccgtcgacatacttgaatccatccttgacctcaagttcagatgattccttgcacatgtctccgatacgaacgctaaactctagattcttgacacattttgtatcgacgatcgttgaaccgatgatatcttcgtaactcactttcttatgagagatgttagacccgagtactggatgggtcttgatgtcgctgtctttctcttcttcgctacatctgatgtcgatagacacctcacagtctttgatcatagcaagagcttcttcatgagtgatcgcgggagagtccttaccttgtcctggggacacgctggacaatctagcattcactgtgtttccatcagcggattctgagatggatttaatctgaggacatttggtgaatccaaagttcattctcagacctccaccgatgatggagtaataagtggtaggaggatctacatcctcgactgatgtggaatcatcttctgattccacctcgggatctggatctgactcggactctgtaatttccgttacggattggcaaatcttatcattggtcggtgtttggtcttgctttgtgactttgataataacatcgattcccatatgatgtttgttttcttcttccgtacacgaggaggaggatgaggatgattgctgaagactggcaggcatagcagctgccgccaggcacatgcatgccagtacgatatattgtttcataattgctattgattgagtactgttctttatgattctacttccttaccgtgcaataaattagaatatattttctacttttacgagaaattaattattgtatttattatttatgggtgaaaaacttactataaaaagtgggtgggtttggaattagtgatcagtttatgtatatcgcaactaccgggcatatggctatcgacatcgagaacattaccacatgataagagattgtatcagtttcgtagtcttgagtattggtattactatatagtatatagatgtcgcccactagagttactgtctccgaatgcggcatgatagtatcattctttgctttcgttaactgtttggaggaagaatctttgttattgcatttaatctcgaaattcagagtgcacacctttctcctgtaaagaaacctgaagtcgctaccttattaagaacggagaagtatccatcacgaaagacgggatcgcagtctttatgattcatagtaatagttagttccgacgttgagatggattcgctgagaccggtagtggtcgtccgagtacacgacgtgtcgttgacgggatacagattaatttccacatcgatatagttaaaggtatttctgggtacgggttcgcatttatctgcggaagagacggtgtgagaatatgttccgagaccacacggagaacagatgacgtctccggatactccgtatcctattccacattttgtttgggaaacacatgccttgcatccggatgatcctttgagaagacaataatatccgggagagcattcacagattctattgtgagtcgtgttacacgatcgcgtcttccgttacaacttagacaagcgggtaaatgattattgcgagatgtgaaggtacccgaaccacacggcgtacatcgtgtgttagtcttgctatcgcataatctggaagcgtatgttcccggacacaaattatggcgtttgtattcgttgtctttacactttccatcggatggtgcatgcggtgctatatctcttccgtttattattatacatgagagaaacaatatatacgagtataatacggacttcatgatttaataatgtagtaatcgtcgtcttgttcctgtttcctacttctccaatcatatagatattttctttctatcatggataatatttgtaatggttctttccgtacaacatactgtttagatgatattgcgcataatttccggaggcaaatacgatagtctagattgaccgatggtagactctaatttattgagtgctttgtcgacgagtttacttttacgctccatcgatagatggcactgttctatgagatcgtcgtacatgggaaatgaaatgtgtctgtctgaatgtatggctttaagatagctgtgataccgtatacaggtcggtgtcggagattcgaatctctttaaggcgacttatgtcacgatgatggaatctatcttatcgaatgatatatttttcataaatacacttttatagtcctcgtttaaacagaatttactatgtagttccgcgaatgactcgtcccttaataggcagtaggctagtatcttttttacgtagtaatcgtcgtagggagagacatcttgtagaacaacgatttaatcataggtagagatactttcagtctgtggtggatgatgtcattcacaacatccgccttgtatatgatgtttctgttttcaaacaccaagtcgaataccgtctttagtcggaaggttgatgtcgtatccgatgtatgaggcaacattgttgttacaattttgaaaggcggtattatagtattcgtctttctgaatgtcgaacctatctaatagataccgtagtatattgagagtgtatccttgattatgttttatgaatagataaagtagatgttgtccttcttccttttgttcgtgccaattgagtaacattatgagaatatgacctgttgcacaatcgttccatgatgggtgtacaatcaagattattacgtatcctcgagataaaagagcatacaccacacgaggactatgtttggtatactgttgaaggtaagtgtgtaaccgcgttaatgtttgctccataatctattatcgcgtagatgaatcgcttctcggctcgcatcttagtgtgacttgacttgtaataattgctttcgtagaacgtggatatgtgtttacagtagtaatgaagagaagtgagttcatcctcgtcggcgcaattagggtcggatcctttgtacagaacgtaatagtttaagctcccattgaatttatatctaagataacacagcaatagatcggatgatttactaaagtcatcaatggtgtccgttagtatatcaaagatcttgttatcgattgatagtggtcatccttgctatcaaagttacgcatgccgtggtgtaacaatatctttaatacagatggattaaatcgtgtattcatcgtatagcaatgtaatggagagttacctcgtttattcagatcgcagtgtttaataactagcttaaacagatgagacgatgtatccacatcaaagaacgtaaaatacatatgacagacattgttgacagaaacgtgaccttcattcttaccgtcgtccataaatacgttaggtataaaccacatactatcgcgaacgatgctcacaatctcgtccatctcataatgatttactttttcataattaaagatgtgaaagaaaaacagaacaatatatttttttagtaatgtttatgcgagacatataaaataaactccgtgtttatgatgccggtaaatgtttttatcatcttggacggaatcgattttgtaatatgtcatggaaacaaatgaaacaggacattatcgctccatgataaattatttaatggagtaataaagtatctccatgggtaatttcgaaatcaagttatcgtctgtattaatgttgtccactatggagtcgatcctctcattgttctttacagtttctgtaatgatggacgttagttcttttttgtaccatttgatgtcggattctttgcgtatctcagtctgtggcgtttgcttcgtttaaagaatatatcaaacatggagacgcctgatatgtagacattcttcattctattaatgtctgctctatagcgctttagttccttatgacgaccggagatatcatactttactttagaaggaaaatcatcatctaggattaaggcgtatctgatacaggcgaataatggttcaggatatagatagcgtatatctctattaaatgcgtcaatcatagtctctagagtgggatggtaactcagtaataaatcaactatcctcgttttgttttctcttctgtaactgcttttctggatggccgtattgattatcgagcgtttactttagaaggaaaatcatcatctaggattaaggcgtatctgatacaggcgaataatggttcaggatatagatagcgtatatctctattaaatgcgtcaatcatagtctctagagtgggatggtaactcagtaataaatcaactatcctcgttttgttttctcttctgtaactgcttttctggatggccgtattgattatcgagcgtgatgttgtaacactcgctccatattccaataaccgctttgcaaattgtatattattgacatcgaccgcgtaatatagtagagttatcgatcatatctatatcatccatgtacttgcttagtatatcaaatacatctatcagtatggtttcataacagtgatacccgcaattattaaatctcgataatatcagaccgtacatacatagacggccattgttcgatacgtgatttacagccgcgtgtccatattttccacgataaaccttacgacgtttacatcgacgagattattattaacaaagtagtcgtgcagaggatagttgttgtccgttatctaacatgcatcgaacgaccatatcgccgtaatgtaagtagtttatcaacatggcttgtacatcctgttgtctaaatctctttagaatgttatcgatgatgtagtggttatattctctggaatcgtacgaagtaatactacgcattacgtcgacaagagtatgacgtctctcaataagaagattaacgatttccatgtctacattatatggggttactctaaatcgcttgtttagataatacgcctctaatatagggctgacgtcgtatactctacacgtgtccacatcctttattaataataatttaacaatctctatatctatggttgagcaagaccagtagtattggatgggtaaagatcctccttcgtctctgccatggatggaaacattgttatcgatcaaacatttaattacatccttggatagagattgagattctctatgagacgatatatagtaatgaagagagttcttacacatatcactgtcgtacatacaggtacgaaatacgtaaccggtgctgtaacattctgatttaagaagccatagcaatacttctggtctcggattaggcgtcgttacgtatatatccaccaatccgagaccattgattgcataattcgtattcttggacggacgtatccgtttatccacaattaggtattttagcagacgtaagtcgatattatacgaatacagatcgaaatcatttatattcgacttgagttcgttagaggaattcgaatagctggatatcagtagatgcacaatctgagatttgacgtatctatgcttactgtatactcctagcggagttaatccttcgttgtttctacaaagtctctcgactccgcgagagagtaacagccgaacaatcttaatgtctgtatcgcatttattgaagacgtaacaatgtagcgcattgtttcctcgtctatctatatgttttgataagttgtgacacgtttcaatctctggttttatttttttgtacgtcacatcttcatccagtagacgacatagaatagtgcactctctaccacaataatccatagctattctggtgctaattattcctatttcacgaaggcaatcattcctcataagatgataaaaagtgtagtgagagagcatgaaggagatttagtatttagcagtgcggatatgatccaagagggtgagatagtcgttctcgttcagaatctttcgcagcataagtagtatgtcgatatacttatcgttgaagactcttccagagacgatagctgattgagtacaaagtccaatgattgcacgaagttcttcggcggttttcatggagtcatttctgatgaaacatttaatgatctccacgcaattgtcccacggaagtgaatccttcaactcaccaccaaagagctccgttgcatcagttctgaaagagatgagaagcctgtagagagaccctgcgctttctctatgggtccatctatgagaaacccacaggatgtattcagtcagacaatgtctgacgtcggccacggtattcagggagtccttagtagcgtggcaatgacagggactgaacttggcacaaggaaaggccattgtgaaggtagacctgtagccgtttatgctaatagagggctttaatttccattttttaatgggttgtggatgaggaatgagagtgatatcatattgagatacgtagttatgtagaggtgtatttcctatattatttactttcggtttcatattttaccaactctttaataaatttcttttcacgatgcatcttattaaatgacgttttctcataagtggacatatagatgcagaagtaatgaagaaaagtattacctctatcatctacataattagggtctgctcctttttttaacaacttatacagtacgtagtagtagtttatcggttttaaatcaagtctagaatatatagtggattaatatatttttatattagctaaagctatctatactatcagaaagcatatcattctcaacttcatcatgagttaaatatttgtgtaatggatgtcatgaacattaaacgtattcatgacatactcctttaataggttttttaaaacagatgattcaaatccttcattcattagataacagtgtaacggagtcgtaccttctactagtttgtttatatcacagcattctacaaacagtctaaacaatagagaagacggacagactttaacgtataaatgacacatgttatcgatattcgttgatgaattattattaaacgtagttatgataaatgattctaacgacatctctcgctagagataaaatctagtatcgtatcatactcgcatagcatagtttttcataattaatacaatatttaaaagacttattcagaaagtattttaatacatgtatcatcgatggagatccatatgaggagtcacttgtagttcttcagtagtaataacagtgctatcatcgatagtataattatatgttgttgtaattggagtaactgttggtagttcttccgtggaatcaataattatactaacagcaatagtataattatataaatatgttccgttgatatcacatattttaatgaactcatttctaacaccctcagctatatctgtccaattaaatgtagccaacaatctactacgttctctttgattgactacttgtacggtagcgacgctacactatctttattgtcttctacatgctccaattgaatgtcatgatacaacgcagtttttcttatgcatgtttcataacaccacgaacatgtcgcagtaagataatttctgtaaattcatgattgccggtcataaacaagcccgtcaataattgtggctatatattcagtttatagagcaaaataattaagcacaatagcgcttaatctcaaaatatgttatgtttatttttttcatattaaacatactggttaaaatcctctaaaggctgatcttcatctataaatcaagatcataattacatttagacagtggtttcatgtttataaaaatgttctttttgtgtgaataaggaatatactaatcaataatcaaccatcgaccccattacgatagtatgcaggcaaccccccattagagaggtacgtgtaatcagtctctccagttttagtatttttataagtcattgttacataaacggcttttaaacagtctcctcgataataagccatatctggaaatttattaaatactcgagtcattttacgcacggtcaaaaaagtaagtaatgtcgacgacttcttacattctatagaaacacctagaatactcattttcttttggaaaatatcctcagactctgatttgaacaatgcacgacctatagtaaaccgtgaccaataagttatattagtcaatggtatatccaaaccatcaggtgtggatagtacgccgatagtccagtctttggtatcgatagtgtagttattgaactgagaagttaccgtatagtctttttggtcatctctaaacaaggaaactaatacctctacactattgaacgatttatcttccgtaatgggtggaataacgggaatataaagtggactagcgatggatgaagtcacgaatataagacacgctattaatccgtatatcatcattttgatattacttataataacgatttgtttaatttttagtttatactattaattgtaaatgatattattattttttttaagtattatcagctttagtttatactattactatttgtaatatttagacatagataaacgtgataaaagtctatttgtttatatttattgcggatagcagtatttccctataaaaagtatacgtcctgtgttgtctttaatcatgtacatgaatggatggtttatgtagaccttcgtacgatataccatcgaaaagttagtcataaatactcctgtaacggccgatgcttctgtatactcctcattaacatctataaacgtcgtatgtagaaatttttctacagtgatagtttcattacacatcttgctaaaatctgcataatatccgaatatattagtaagtcctaaattttctaaaatcggtaccagattatacggttctgtcatttccactttaaactttggcatatacaagtctatacttttagtagataacataccacaccattttttaaatttttcatctgttatatttttttctatgttatatataccttctatgtcgtccggtagtataattaccatactagagtttccctcgtatggaatatcgataatagagaatcctccgaataattcattaatatgtacatattgcaagttattctcggtacccaccatcatatcaacgctggtaactatattcttagaaatataaaacttgtctgtatatgtaagatgtttagaaaatggatatttccacattgctttaaaatggacggcgctaacaactgtcatacgagtattaatggatagcggactagtcaataaggaattaattttaccatttgtcatcgtcttaacccattcgttgattagttcctttgtttggttagcattattaaagtttacagtttgaaaatcgtcttttattttttgtaggaaggaggcgtggaactcgatactatcgctaccgtatattttatttgcggtagctagtgtcgcacaatacggaatatctacgtccatgtcattattgtcatccttcttatcatcgggtgtattctcattcatattctctatatattttgatagttgttcagctgtagaaccagctgctccatgatttagaatagataaagtagataaaatagaaactggagaaatcaaaacattttcatcagggtgttttaagattagttctttaaagatatccatggtatagaccaaacaataacgataacgatatatatcataaataaataatgttaaatttcagtttatgtttgtaccccgtattcatacttaacaaattggtattgcgtacacaatcaatcatattacataccattaataatgcaagcataaaaaatcgttagtagatgtttctaaatataggttccgtaagcaaagaatataagaatgaagcggtaatgataaaatcaatcgttatctaaaatgatcatactcatttattttattctattatattaacacatacatttttaacagcaacacattcaatattgtattgttatttttatattatttacacaattaacaatatattattagtttatattactgaattaataatataaaattcccaatcttgtcataaacacacactgagaaacagcataaacacaaaatccatcaaaaatgttgataaattatctgatgttgttgttcgctgctatgataatcagatcattcgccgatagtggtaacgctatcgaaacgacatcgccagaaattacaaacgctacaacagatattccagctatcagattatgcggtccagagggagatggatattgtttacacggtgactgtatccacgctagagatatcgacggtatgtattgtagatgctctcatggttatacaggcattagatgtcagcatgtagtattagtagactatcaacgttcagaaaacccaaacactacaacgtcatatatcccatctcccggtattatgcttgtattagtaggcattattattattacgtgttgtctattatctgtttataggttcactcgacgaactaaactacttatacaagatatggttgtgccataatttttataaattttttttatgagtatttttacaaaaatgtataaagtgtatgtcttatgtatatttataaaaatgctaagtatgcgatgtatctatgttatttgtatttatctaaacaatacctctacctctagatattatacaaaaattttttatttcggcatattaaagtaaaatctagttaccttgaaaatgaatacagtgggtggttccgtatcaccagtaagaacataatagtcaaatacagtatccgattgagattttgcatacaatactagtctagaaagaaatttgtaatcatcttctgtgacgggagtccatatatctgtatcatcgtctagtttatcagtgtcccatgctatatttctgttatcatcattagttaatgaaaataactctcgcgcttcagaaaagtcaaatattgtatccatacatacatctccaaaactatcgcttatacgtttatctttaacgatacctatacctagatggttatttactaacagacattttccagatctattgactataactcctatagtttccacatcaaccaagtaatgatcatctattgttatataacaataacataactcttttccatttttatcagtatgtatatctatatcaacgtcgtcgttgtagtgaatagtagtcattgatctattatatgaaacggatatgtctagaacggcaattgttttacgtccagttaacactttctttgatttaaagtctagagtctttgcaaacataatatccttatccgactttatatttcctgtagggtggtataattttattttgcctccacatatcggtgtttccaaatatattactagacaatattccatatagttattagttaagggtacccaattagaacacgtacgcttattatcatcatttggatcgtatttcataaaagttattgtgttatcgatgtcaacacattctacattttttaatcgtctatatagtatttttctgatattttctataatatcagaattgtcttccatcggaagttgtatactatcggaatcagttacatgtttaaataattctctgatgtcattccttatacaatcaaattcattattaaacagtttaatagtctgtagacctttatcgtcgtaaatatccattgtcttattagttacgcttatttttatgtgttttacgttgctttattatattttataagaatgattgtttgacgaatcacgagaactattaagacacattattaggtatatattataaaaaagtttttgattacgatgttataagaggaaagaggacacattaacatcatacatcaattaactacattcttataacatcgtaatcaaaagaattgcaattttgatgtataacaactgtcaatgggttatggaattgtatattacatattatacggtatgttggtaacgacaaataccggtcggtaattgtctgccggtgtaatagaattatatatatctatctattacaccggccttgtatacataataataagttgtggtagtatgatctccatatttataatttaggactttgtattcagtatttttggaatcataaaaaataaaaaaaagttttactaatttaaaatttaaaaagtatttacatttttttcactgtttagtcgcggatatggaattcgatcctgccaaaatcaatacatcatctatagatcatgtaacaatattacaatacatagatgaaccaaatgatataagactaacagtatgcattatccgaaatattatatcaatatcacaaaaataaatccacatttggctaatcaatttcgggcttggaaaaaacgtatcgccggaagggactatataactaacttatctagagatacaggaatacaacaatcaaaacttactgaaactatacgtaactgtcaaaaaaatagaaacatatatggtctatatatacactacaatttagttattaatgtggttattgattggataaccgatgtgattatcaatcaatattaagagggttggtaaattggtacatagctaataatacctatactccaaatacacccaataatacaacaaccatttctgagttggatatcatcaaaatactggataaatacgaggacgtgtatagagtaagtaaagaaaaagaatgtggaatttgctatgaagttgtttactcaaaacgatagatactttggtttattggattcgtgtaatcatatattttgcataacatgtatcaatatatggcatagaacacgaagagaaaccggtgcgtcggataattgtcctatatgccgtacccgttttagaaacataacaatgagcaagttttataagctagttaactaataaataaaaagtttaatttgttgacgacgtatgtcgttattttttctcgtataaaagattaatttgattctaatataatctttagtattggataaatatcaattcaaattaattccattagattatatcataaataaaaatagtagcacgcactacttcagccaaatattcttttttgaaacgccatctatcgtagtgaggacacaagtgaacctataattatcaaatttattagtatcagtcacatgaaggactttctgtagagtgacgattccactatctgtggtacgaacggtttcatcttctttgatgccatcacccagatgttctataaacttggtatcctcgtccgatttcatatcctttgccaaccaatacatatagctaaactcaggcatatgttccacacatcctgaacaatgaaattctccagaagatgttacaatgtctagatttggacatttggtttcaaccgcgttaacatatgagtgaacacacccatacatgaaagcgatgagaaataggattctcatcttgccaaaatatcactagaaaaaatttatttatcaattttaaaggtataaaaaatacttattgttgctcgaatattttgtatttgatggtatacggaagattagaaatgtaggtattatcatcaactgattctatggttttatgtattctatcatgtttcactattgcgttggaaataatatcatatgcttccacatatattttattttgttttaactcataatactcacgtaattctggattattggcatatctatgaataattttagctccatgatcagtaaatattaatgagaacatagtattaccacctaccattatttttttcatctcattcaattcttaattgcaaagatctatataatcattatagcgttgacttatggactctgaaatcttagacgatgtacagtcatctataatcatggcatatttaatacattgttttatagcatagtagttatctacgatgttagatatttttctcaataaatcaatcacataatctaatgtaggtttatgacataatagcattttcagcagttcaatgtttttagattcgttgatggcaatggctatacatgtatatccgttatttgatctaatgttgacatctgaaccggattctagcagtaaagatactagagattgtttattatatctaacagccttgtgaagaagtgtttctcctcgtttgtcaatcatgttaatgtctttaagataaggtaggcaaatgtttatagtactaagaattgggcaagcataagacatgtcacaaagaccctttttgtatgtataagtgtaaaaattataacatccatagttggatttacataggtgtccaatcgggatctctccatcatcgagataattgatggcatctcccttccttttttagtagatatttcatcgtgtaagaatcaatattaatatttctaaagtatccgtgtatagcctctttatttaccacagttccatattccactagagggatatcgccgaatgtcatatactcaattagtatatgttggaggacatccgagttcattgttttcaatatcaaagagatggtttccttatcatttctccatagtggtacaatactacacattattccgtgcggctttccattctccaaaaacaatttgaccaaatctacatctttattgtatctataatcactatttagataatcagccataattactcgagtgcaacatgttagatcgtctatatatgaataagccgtgttatctattcctttcattaacaatttaacgatgtctatatctatatgagatgacttaatataatattgaagagctgtacaatagtttttatctataaaagacggcttgattccgtgattaattagacatttaacaacttccggacgcacatatgctctcgtatccgactttgaatacagatgagagatgatatacagatgcaatacggtaccgcaatttcgtagttgataatcatcatacgcgtatcagtactcgtcctcataaagaacactgcagccattttttatgaacaaatcaataattttaggaacaggatcattgtcattacataattttctataactgaacgatggttttcacatttaacactcaagtcaaatccatgttctaccaacacctttatcaagtcaacgtctacatttttggatttcatatagctgaatatattaaagtcatttatgttgctaaatccagtggcttctagtagagccatcgctatatcctttaactttaacatgtctactatttgtgtattcttctaatggggtaagctgtctccaatttttgcgtaatggattagtgccactgtctagtagtagtttgacgacctcgacattattacaatgctcattaaaaaggtatgcgtgtaaagcattattcttgaattggttcctggtatcattaggatctctgtctttcaacatctgtttaagttcatcaagagccacctcctcattttccaaatagtcaaacattttgactgaatgagctactgtgaactctatacacccacacaactaatgtcattaaatatcatgtcaaaaacttgtacaattattaataaaaataatttagtgtttaaattttaccagttccagattttacacctccgttaaccccactttttacaccactggacgatcctcctccccacattccaccgccaccagatgtataagttttagatcctttattactaccatcatgtccatggataaagacactccacatgccgccactaccccctttagaagacatattaataagacttaaggacaagtttaacaataaaattaatcacgagtaccctactaccaacctacactattatatgattatagtttctatttttacagtaccttgactaaagtttctagtcacaagagcaatactaccaacctacactattatatgattatagtttctatttttataggaacgcgtacgagaaaatcaaatgtctaatttctaacggtagtgttgataaacgattatcgtcaatggatacctcctctatcatgtcgtctattttcttactttgttctattaacttattagcattatatattatttgattataaaacttatattgcttattagcccaatctgtaaatatcggattattaacatatcgtttctttgtaggtttatttaacatgtacatcactgtaagcatgtccgtaccatttattttaatttgacgcatatccgcaatttctttttcgcagtcggttataaattctatatatgatggatacatgctacatgtgtacttataatcgactaatatgaagtacttgatacatattttcagtaacgatttattattaccacctatgaataagtacctgtgatcgtctaggtaatcaactgttttcttaatacattcgatggttggtaatttactcagaataatttccaatatcttaatatataattctgctatttctgggatatatttatctgccagtataacacaaatagtaatacatgtaaacccatattttgttattatattaatgtctgcgccattatctattaaccattctactaggctgacactatgcgacttaatacaatgataaagtatactacatccatgtttatctattttgtttatatcattaatatacggcttacaaagttttagtatcgataacacatccaactcacgcatagagaaggtagggaataatggcataatatttattaggttatcatcattgtcattatctacaactaagtttccattttttaaaatatactcgacaactttaggatctctattgccaaatttttgaaaatatttatttatatgcttaaatctatataatgtagctccttcatcaatcatacatttaataacattgatgtatactgtatgataagatacatattctaacaatagatcttgtatagaatctgtatatcttttaagaattgtggatattaggatattattacgtaaactattacacaattctaaaatataaaacgtatcacggtcgaataatagttgatcaactatataattatcgattttgtgatttttcttcctaaactgtttacgtaaatagttagatagaatattcattagttcatgaccactatagttactatcgaataacgcgtcaaatatttcccgtttaatatcgcatttgtcaagataataatagagtgtggtatgttcacgataagtataataacgcatctctttttcgtgtgaaattaaatagtttattacgtccaaagatgtagcataaccatcttgtgacctagtaataatataataatagagaactgttttacccattctatcatcataatcagtggtgtagtcgtaatcgtaatcgtctaattcatcatcccaattataatattcaccagcacgtctaatctgttctattttgatcttgtatccatactgtatgttgctacatgtaggtattcctttatccaataatagtttaaacacatctacattgggatttgatgttgtagcgtatttttctacaatattaataccatttttgatactatttatttctatacctttcgaaattagtaatttcaataagtctatatcgatgttatcagaacatagatattcgaatatatcaaaatcattgatatttttatagtcgactgacgacaataacaaaatcacaacatcgtttttgatattattatttttcttggtaacgtatgcctttaatggagtttcaccatcatactcatataatggatttgcaccactttctatcaatgattgtgcactgctggcatcgatgttaaatgttttacaactatcatagagtatcttatcgttaaccatgattggttgttgatgctatcgcatttttttggtttctttcatttcagttatgtatggatttagcacgtttgggaagcatgagctcatatgatttcagtactgtagtgtcagtactattagtttcgatcagatcaatgtctaaatctatagaatcaaaacacgataggtcagaagataatgaatatctgtacgcttcttgttgtactgtaacttctggttttgttagatggttgcatcgtgctttaacatcaatggtacaaattttatcctcgctttgtgtatcatattcgtccctactataaaattgtatattcagattatcatgagatgtgtatacgctaacggtatcaataaacggagcacaccatttagtcataaccgtaatccaaaaatttttaaagtatatcttaacgaaagaagttgtgtcattgtctacagtgtatggtattagatcctcataagtgtatatatctagagtaatgtttaatttatcaaatggttgataatatggatcgtcgtggcaatttcctaagacgaaaataagacataaacacgcaataaatctaatcgaagacatggttactccttaaaaaaatacgaataatcaccttggctatttagtaagtgtcatttaacactatactcatattaatccatggactcataatctctatacgggattaacggatgttctatatacggggatgagtagttctcttctttaactttatactttttactaatcatatttagactgatgtatgggtaatagtgtttgaagagctcgttctcatcatcagaataaatcaatatctctgtttttttgttatacagatgtattacagcctcatatattacgtaatagaacgtgtcatctaccttattaactttcaccgcatagttgtttgcaaatacggttaatcctttgacctcgtcgatttccgaccaatctgggcgtataatgaatctaaactttaatttcttgtaatcattcgaaataatttttagtttgcatccgtagttatcccctttatgtaactgtaaatttctcaacgcgatatctccattaataatgatgtcgaattcgtgctgtatacccatactgaatggatgaacgaataccgacggcgttaatagtaatttactttttcatctttacatattgggtactagttttactatcataagtttataaattccacaagctactatggaataagccaaccatcttagtataacacacatgtcttaaagtttattaattaattacatgttgttttatatatcgctacgaatttaaacagagaaatcagtttaggaaaaaaaattatctatctacatcatcacgtctctgtattctacgatagagtgctactttaagatgagacatatccgtgtcatcaaaaatatactccattaaaatgattattccggcagcgaacttgatattggatatatcacaacctttgttaatatctacgacaatagacagcagtcccatggttccataaacagtgagtttatctttctttgaagagatattttgtagagatcttataaaactgtcgaatgacatcgcatttatatctttagctaaatcgtatatgttaccatcgtaatatctaaccgcgtctatcttaaacgtttccatcgctttaaagacgtttccgatagatggtctcatttcatcagtcatactgagccaacaaatataatcgtgtataacatctttgatagaatcagactctaaagaaaacgaatcggctttattatacgcattcatgataaacttaatgaaaaatgtttttcgttgtttaagttggatgaatagtatgtcttaataattgttattatttcattaattaatatttagtaacgagtacactctataaaaacgagaatgacataactagttatcaaagtgtctaggacgcgtaattttcatatggtatagatcctgtaagcattgtctgtattctggagctattttctctatcgcattagtgagttcagaatatgttataaatttaaatcgaataacgaacataactttagtaaagtcgtctatattaactcttttattttctagccatcgtaataccatgtttaagatagtatattctctagttactacgatctcatcgttgtctagaatatcacatactgaatctacatccaattttagaaattggtctgtgttacatatctcttctatattattgttgatgtattgtcgtagaaaactattacgtagaccattttctttataaaacgaatatatagtactccaattatctttaccgatatatttgcacacataatccattctctcaatcactacatctttaagattttcgttgttaagatatttggctaaactatataattctattagatcatcaacagaatcagtatatatttttctagatccaaagacgaactctttggcgtcctctataatattcccagaaaagatattttcgtgttttagtttatcgagatctgatctgttcatatacgccatgattgtacggtacgttatgataaccgcataaaataaaaatccattttcatttttaaccaatactattcataattgagattgatgtaatactttgttactttgaacgtaaagacagtacacggatccgtatctccaacaagcacgtagtaatcaaatttggtgttgttaaacttcgcaatattcatcaatttagatagaaacttatactcatcatctgttttaggaatccatgtattattaccactttccaacttatcattatcccaggctatgtttcgtccatcatcgttgcgcagagtgaataattcttttgtattcggtagttcaaatatatgatccatgcatagatcggtaaagctattgtagatgtgatttttcctaaatctaatataaaactcgtttactagcaaacactttcctgatttatcgaccaagacacatatggtttctaaatctatcaagtggtggggatccatagttatgacgcagtaacatagattattacattcttgactgtcgctaatatctaaatatttattgttatcgtattggattctgcatatagatggcttgtatgtcaaagatatagaacacataaccaatttatagtcgcgctttacattctcgaatctaaagttaagagatttagaaaacattatatcctcggatgatgttatcactgtttctggagtaggatatattaaagtctttacagatttcgtccgattcaaataaatcactaaataatatcccacattatcatctgttagagtagtatcattaaatctattatattttatgaaagatatatcactgctcacctctatatttcgtacatttttaaactgtttgtataatatctctctgatacaatcagatatatctattgtgtcggtagacgataccgttacatttgaattaatggtgttccattttacaacttttaacaagttgaccaattcatttctaatagtatcaaactctccatgattaaatattttaatagtatccattttatatcactacggacacaaagtagctgacataaaccattgtataatttttatgttttatgtttattagcgtacacattttggaagttccggcttccatgtatttcctggagagcaagtagatgatgaggaaccagatagtttatatccgtacttgcacttaaagtctacattgtcgttgtatgagtatgatcttttaaacccgctagacaagtatccgtttgatattgtaggatgtggacatttaacaatctgacacgtgggtggatcggaccattctcctcctgaacacaggacaccagagttaccaatcaacgaatatccactattgcaactataagttacaacgctcccatcggtataaaaatcctcgtatccgttatgtcttccgttggatatagatggaggggattggcatttaacagattcacaaataggtgcctcgggattccataccatagatccagtagatcctaattcacaatacgatttagattcaccgatcaaatgatatccgctattacaagagtacgttatactagagccaaagtctactccaccaatatcaagttggccattatcgatatctcgaggcgatgggcatctccgtttaatacattgattaaagagtgtccatccagtacctgtacatttagcatatataggtcccattttttgctttctgtatccaggtagacatagatattctatagtgtctcctatgttgtaattagcattagcatcagtctccacactattcttaaatttcatattaatgggtcgtgacggaatagtacagcatgatagaacgcatcctattcccaacaatgtcaggaacgtcacgctctccaccttcatatttatttatccgtaaaaatgttatcctggacatcgtacaaataataaaaagcccatatatgttcgctattgtagaaattgtttttcacagttgctcaaaaacgatggcagtgacttatgagttacgttacactttggagtctcatctttagtaaacatatcataatattcgatattacgagttgacatatcgaacaaattccaagtatttgattttggataatattcgtattttgcatctgctataattaagatataatcaccgcaagaacacacgaacatctttcctacatggttaaagtacatgtataattctatccatttgtcttccttaactatatatttgtatagataattacgagtctcgtgagtaattccagtaattacatagatgtcgccgtcgtactctacagcataaactatactatgatgtctaggcatgggagacttttttatccaacgatttttagtgaaacattccacatcgtttaatactacatatttttcatacgtggtataaactccacccattacatatatatcatcgtttacgaataccgacgcgcctgaatatctaggagtaattaagtttggaagtcttatccatttcgaagtgccgtgtttcaaatattctgccacacccgttgaaatagaaaattctaatcctcctattacatataactttccatcgttaacacaagtactaacttctgattttaacgacgacatattagtaaccgttttccattttttcgtttcaagatctacccgcgatacggaataaacatgtctattgttaatcatgccgccaataatgtatagacaattatgtaaaacatttgcattatagaattgtctatctgtattaccgactatcgtccaatattctgttctaggagagtaatgggttattgtggatatataatcagagtttttaatgactactatattatgttttataccatttcgtgtcactggctttgtagatttggatatagttaatcccaacaatgatatagcattgcgcatagtattagtcataaacttgggatgtaaaatgttgatgatatctacatcgtttggatttttatgtatccactttaataatatcatagctgtaacatcctcatgatttacgttaacgttttcgtgggataagatagttgtcagttcatcctttgataattttccaaattctggatcggatgtcaccgcagtaatattgttgattatttctgacatcgacgcattatatagttttttaattccatatcttttagaaaagttaaacatccttatacaatttgtggaattaatattatgaatcatagtttttacacatagatctactacaggcggaacatcaattattatggcagcaactagtatcatttctacattgtttatggtgatgtttatcttcttccagcgtatatagtctaatagcgattcaaacgcgtgatagtttataccattcaatataatcgcttcatcctttagatggtgatcctgaattcgtttaaaaaaattatacggagatgccgtaataatttccttattcacttgtataatttccccattgatagaaaatatcacgctttccattcttgaagtactataagtaattatagtataatgtaaaggtttatatattcaatattttttataaaaaaatcattttgacattaattcctttttaaatttccgtctatcatctatagaaacgtattctatgaatttataaaatgcttttacgtgtcctatcgtaggcgatagaaccgctaaaaagcctatcgaatttctacaaaagaatctgttatatggtatagggagagtataaaacattaaatgtccgtacttattaaagtattcagtagccaatcctaactctttcgaatacttattaatggctcttgttctgtacgaatctatttttttgaacaacggacctagtggtatatcttgttctatgtatctaaaataatgtctgactagatccgttagtttaatatcctcagtcatcttgtctagaatggcaaatctaactgcgggtttaggctttagtttagtttttatatctacatctatgtctttatctaacaccaaaaatataatagctaatattttattacaatcatccggatattcttctacgatctcactaactaatgtttctttggttatactagtatagtcactatcggacaaataaagaaaatcagatgatcgatgaataatacatttaaattcatcatctgtaagatttttgagatgtcttattaaaatattattagggtcagtactcattatcattaggcagctattacttattttattatttttcaccatatagatcaatcattagatcatcaaaatatgtttcaatcatcctaaagagtatggtgaatgactcttcccatctaatttctgaacgttcaccaatgtctctagccactttggcactaatagcgatcattcgcttagcgtcttctatattattaactggttgattcaatctatctagcaatggaccgtcggacagcgtcattctcatgttcttaatcaatgtacatacatcgccgtcatctaccaattcatccaacaacataagctttttaaaatcatcattataataggtttgatcgttgtcatttctccaaagaatatatctaataagtagagtcctcatgcttagtaatttaactattttagttaacaactattttttatgttaaatcaattagtacaccgctatgtttaatacttattcatattttagtttttaggattgagaatcaatacaaaaaattaatgcatcattaattttagaaatacttagtttccacgtagttaatgaaacatttgaactcatcgtacaggacgttctcgtacaggacgtaactataaaccggtttatatttgttcaagatagatacaaatccgataactttttttacgaattctacgggatccactttaaaagtgtcataccgggttctttttattcttttaaacagatcaatggtgtgatgttgattaggtcttttacgaatttgatatagaatagcgttcacatatcctccataatggtcaatcgccatttgttcgtatgtcataaattctttaattatatgacactgtgtattatttagttcatccttgttcatcattaggaatctatccaaaatggcaattatactagaactataggtgcgttgtatacacatattgatgtgtctgtttatacaatccatgatatttggatccatgctactaccttcgggtaaaattgtagcatcatataccatttctagtactttaggttcattattatccattgcagaggacgtcatgatcgaatcctaaaaaaatatattatttttatgttattttgttaaaaataatcatcgaatacttcgtaagatactccttcatgaacataatcagttacaaaacgtttatatgaagtaaagtatctacgatttttacaaaagtccggatgcataagtacaaagtacgcgataaacggaataataatagatttatctagtctatctttttctatagctttcatagttagatacatggtctcagaagtaggattatgtaacatcagcttcgataaaatgactgggttatttagtcttacacattcgctcatacatgtatgaccgttaactacaaagtctacactaaaatgattgaacaatagatagtctaccattgtttcgtattcagatagtacagcgtagtacatagcatcttcacaaattatatcattgtctaatagatatttgacgcatcttatggatcccacttcaacagccatcttaaaatcggtagaatcatattgctttcctttatcattaataatttctaaaacatcatctctatcataaaagatacaaatattaactgtttgatccgtaataacattgctagtcgatagcaatttgttaataagatgcgctgggctcaatgtcttaataagaagtgtaagaggactatctccgaatttgttttgtttattaacatccgttgatggaagtaaaagatctataatgtctacattcttgactgttttagagcatacaatatggagaggtgtatttccatcatgatctggttttgagggactaattcctagtttcatcatccatgagattgtagaagcttttggattgtctgacataagatgtctatgaatatgatttttgccaaatttatccactatcctggcttcgaatccgatggacattatttttttaaacactctttctgaaggatctgtacacgccaacaacggaccacatccttcttcatcaaccgagttgttaatcttggctccatactgtaccaataaatttattctctctatgacttcatcatctgttcccgagagataatatagaggtgttttattatgtttatcacacgcgtttggatctgcgccgtgcgtcagcagcatcgcgactattctattattattaattttagaagctatatgcaatggataatttccatcatcatccgtctcatttggagagtatcctctatgaagaagttcttcgacaaatcgttcatctagtcctttaattccacaatacgcatgtagaatgtgataattatttccagaaggttcgatagcttgtagcatattcctaaatacatctaaatttttactattatatttggcataaagagatagataatactcggccgacataatgttgtccattgtagtataaaaattaatatttctatttctatttctgtatatttgcaacaatttactctctataacaaatatcataacttagttcttttatgtcaagaaggcactggtttagttcatctataaatgtcacgccataactaccacgcatgctatactcagaattatgataaagatatttatccttggggtgtaggtaatggggattaatctttgttggatcagtctctaagttaacacatgtcacacatgatccatttatagttatatcacacgatgatgatttatgaattgattccggaagatcgctatcgtattttgtggttccacaattcatttccatacatgttattgtcacactaatattatgatgaactttatctagccgctgagtggtaaacaacagaacagatagtttattatctttaccaacaccctcagccgctgccacaaatctctgatccgtatccatgatggtcatgtttatttctagtccgtatccagtcaacactatgttagcatttctgtcgatatagctttcactcatatgacactcaccaataatagtagaattaatgtcgtaatttacaccaatagtgagttcggcggcaaagtaccaataccggtaatcttgtcgaggaggacatatagtattcttgtattctaccgaatacccgagagatgcgatacaaaagagtaagactaatttgtaaaccatcttactcaaaatatgtaacaatagtacgatgcaatgagtaagacaataggaaatctatcttatatacacataattattctatcaattttaccaattagttagtgtaatgttaacaaaaatgtgggagaatctaattagtttttctttacacaattgacgtacatgagtttgagttccttgtttttgctaattatttcatccaatttattattcttgacgatatcgagatcttttgtataggagtcagacttgtattcaacatgcttttctataatcattttagctatttcggcatcatccaatagtacattttccagattagcagaatagatattaatgtcgtatttgaacagagcctgtaacatctcaatgtctttattatctatagccaatttaatgtccggaatgaagagaagggaattattggtgtttgtcgacgtcatatagtcgagcaagagaatcatcatatccacgtgtccattttttatagtgatgtgaatacaactaaggagaatagccagatcaaaagtagatggtatctctgaaagaaagtaggaaacaatacttacatcattaagcatgacggcatgataaaatgaagttttccatccagttttcccatagaacatcagtctccaatttttcttaacaaacagttttaccgtttgcatgttaccactatcaaccgcataatacaatgcagtgtttcccttgtcatcaaattgtgaatcatccagtccactgaatagcaaaatctttactattttagtatcttccaatgtggctgcctgatgtaatggaaattcattctctagaagatttttcaatgctccagcgttcaacaacgtacatactagacgcacgttattatcagctattgcataatacaaggcactatgaccgttgatatccgccttaaatgcatctttgctagagagaaagcttttcagctgcttagacttccaagtattaattcgtgacagatccatgtctgaaacgagacgctaattagtgtatattttttcattttttataattttgtcatattgcaccagaattaataatatctctaatagatctgattagtagatacatggctatcgcaaaacaacatatacacatttaataaaaataatatttattaagaaaattcagatttcacgtacccatcaatataaataaaataatgattccttacaccgtacccatattaaggagattccaccttacccataaacaatataaatccagtaatatcatgtctgatgatgaacacaaatggtgtattaaattccagtttttcaggagatgatctcgccgtagctaccataatagtagatgcctctgctacagttccttgttcgtcgacatctatctttgcattctgaaacattttataaatatataatgggtccctagtcatatgtttaaacgacgcattatctggattaaacatactaggagccatcatttcggctatcgacttaatatccctcttattttcgatagaaaatttagggagtttaagattgtacactttattccctaattgaaacgaccaatagtctaattttgcagccgtaatagaatctgtgaaatgggtcatattatcacctattgccaggtacatactaatattagcatccttatacggaaggcgtaccatgtcatattctttgtcatcgattgtgattgtatttccttgcaatttagtaactacgttcatcatgggaaccgttttcgtaccgtacttattagtaaaactagcattgcgtgttttagtgatatcaaacggatattgccatatacctttaaaatatatagtattaatgattgcccatagagtattattgtcgagcatattagaatctactacattagacataccggatctacgttctactatagaattaattttattaaccgcatctcgtctaaagtttaatctatataggccgaatctatgatattgttgataatacaacggtttaatacacacagtattatctacgaaactttgataagttagatcagtgtacgtatatttagatgttttcagcttagctaatcctgatattaattctgtaaatgctggacccagatctctttttctcaaatccatagtcttcaataattctattctagtattacctgatgcaggcaatagcgacataaacatagaaaacgaataaccaaacggcgagaagacaatattatcatcttgaatatttttatacgctactataccggcattggtaaatccttgcagacgataggtagacgctgaacacgctaacgatagtatcaataacgcaatcatgattttatggtattaataattaaccttatttttatgttcggtataaaaaaattattgatgtctacacatccttttgtaattgacatctatatatccttttgtataatcaactctaatcactttaacttttacagttttccctaccagtttatccctatattcaacatatctatccatatgcatcttaacactctctgccaagatagcttcagagtgaggatagtcaaaaagataaatatatagagcataatcattctcgtatactctgccctttattacatcacccgcattgggcaacgaataacaaaatgcaagcatcttgttaacgggctcgtaaattgggataaaaattatgtttttatatctattttattcaagagaatattcaggaatttctttttccggttgtatctcatcgcagtatatatcatttgtacattgtttcatattttttaatagtttacaccttttagtaggactagtatcgtacaattcatagctgtattttgaattccaatcacgcataaaaatatcttccaattgttgacgaagacctaatccatcatccggtgtaatattaatagatgctccacatgtatccgtaaagtaatttcctgtccaatttgaggtacctatataggccgttttatcggttaccatatatttggcatggtttaccctagaatacggaatgggaggatcagcatctggtacaataaatagctttacttctatatttatgtttttagattttagcatagcgatagatcttaaaaagtttctcatgataaacgaagatcgttgccagcaactaatcaatagcttaacggatacttgtctgtctatagcggatcttcttaattcatcttctatataaggccaaaacaaaattttacccgccttcgaataaataatagggataaagttcataacagatacataaacgaatttactcgcatttctaatacatgacaataaagcggttaaatcattggttctttccatagtacatagttgttgcggcgcagaagcaataaatacagagtgtggaacaccacttacgttaatactaagaggatgatctgtattataatacgacggataaaagtttttccaattatatggtagattgttaactccaagataccagtatacctcaaaaatttgagtgagatccgctgccaagttcctattattgaagatcgcaatacccaattccttgacctgagttagtgatctccaatccatgttagcgcttcctaaataaatatgtgtattatcagatatccaaaattttgtatgaagaactcctcctaggatatttgtaatatctatgtatcgtacttcaactccggccatttgtagtctttcaacatcctttaatggtttgttagatttattgacggctactctaactcgtactcctcttttgggtaattgtacaatctcgtttaatattatcgtgccgaaattcgtacccacttcatccgataaactccaataaaaagatgatatatctagtgtttttgtggtattggatagaatttccctccacatgttaaatgtagacaaatatactttatcaaattgcatacctataggaatagtctctgtaatcactgcgattgtattatccggattcattttatttgttaaaaaataatcctatatcacttcactctattaaaaatccaagtttctatttctttcatgactgattttttaacttcatccgtttccttatgaagatgatgtttggcaccttcataaatttttatttctctattacaatttgcatgttgcatgaaataatatgcacctaaaacatcgctaatcttattgtttgttccctggagtatgagagtcggggggtgttaatcttggaaattatttttctaaccttgttggtagccttcaagacctgactagcaaatccagccttaattttttcatgattgactaatgggtcgtattggtatttataaactttatccatatctctagatactgattctggacatagctttccgactggcgcatttggtgtgatggttcccataagtttggcagctagcagattcagttttgaaacagcatctgcattaactagaggagacattagaatcattgctgtaaacaagtttggattatcgtaagaggctagctcccatggaatgacccaataagtagatttaatagttaccacgtgctgtaccaaagtcatcaatcatcattttttcaccattacttcttccatgtccaatatgatcatgtgagaatactaaaattcctaacgatgatatgttttcagctagttcgtcataacgtccagaatgtttaccagctccatgacttatgaatactaatgccttaggatatgtaataggtttccaatatatgtaatcattgtccagattgaacatacagtttgcactcatgattcacgttatataactatcaatattaacagttcgtttgatgatcatattatttttatgttttattgataattgtaaaaacatacaattaaatcaatatagaggaaggagacggctactgtcttttgtgagatagtcatggcgactaaattagattatgaggatgctgttttttactttgtggatgatgataaaatatgtagtcgcgactccatcatcgatctaatagatgaatatattacgtggagaaatcatgttatagtgtttaacaaagatattaccagttgtggaagactgtacaaggaattgatgaagttcgatgatgtcgctatacggtactatggtattgataaaattaatgagattgtcgaagctatgagcgaaggagaccactacatcaattttacaaaagtccatgatcaggaaagtttattcgctaccataggaatatgtgctaaaatcactgaacattggggatacaaaaagatttcagaatctagattccaatcattgggaaacattacagatttgatgaccgacgataatataaacatcttgatactttttctagaaaaaaaattgaattgatgatataggggtcttcataacgcataattattacgttagcattctatatccgtgttaaaaaaaattatcctatcatgtatttgagagttttatatgtagcaaacatgatagctgtgatgccaataagctttagatattcacgcgtgctagtgttagggatggtattatctggtggtgaaatgtccgttatataatctacaaaacaatcatcgcatatagtatgcgatagtagagtaaacatttttatagtttttactggattcatacatcgtctacccaattcggttataaatgaaattgtcgccaatcttacacccaaccccttgttatccattagtatagtattaacttcgttatttatgtcataaactgtaaatgattttgtagatgccatatcatacatgatattcatgtccctattataatcattactaactttatcacaatatatgttgataatatctatatatgatctagtctttgtgggcaactgtctatacaagtcgtctaaacgttgtttactcatatagtatcgaacagccatcattacatggtcccgttccgttgatagataatcgagtatgttagtggacttgtcaaatctatataccatattttctggaagtggatatacatagtcgtgatcaacattattgctagcctcatcttctatatcctgtactataccattatctatatcatctacataatctacgatattattacacataaacatcgacaacatactattgtttattatctaagtcctgttgatccaaacccttgatctcctctatttgtactatctagagattgtacttcttccagttctggataatatatacgttgatagattagctgagctattctatctccagtatttacattaaacgtacattttccattattaataagaatgactcctatgtttcccctataatcttcgtctattacaccacctcctatatcaatgccttttagtgacagaccagacctaggagctattctaccatagcagaacttaggcatggacatactaatatctgtcttaattaactgtctttctcctggagggatagtataatcgtaagcgctatacaaatcatatccggcagcacccggcgattgcctagtaggagatttagctctgttagtttccttaacaaatctaactggtgagttaatattcatgttgaacataaaactaatattttatttcaaaattatttaccatcccatatattccatgaataagtgtgatgattgtacacttctatagtatctatatacgattcacgataaaatcctcctatcaatagcagtttattatccactatgatcaattctggattatccctcggataaataggatcatctatcagagtccatgtattgctggattcacaataaaattccgcatttctaccaaccaagaataaccttctaccgaacactaacgcgcatgatttataatgaggataataagtggatggtccaaactgccactgatcatgattgggtagcaaatattctgtagttgtatcagtttcagaatgtcctcccattacgtatataacattgtttatggatgccactgctggattacatctaggtttcagaagactcggcatattaacccaagcagcatccccgtggaaccaacgctcaacagatgtgggatttggtagacctcctactacgtataatttattgttagcgggtatcccgctagcatacagtctggggctattcatcggaggaattggaatccaattgtttgatatataatttacagctatagcattgttatgtatttcattgttcatccatccaccgatgagatatactacttctccaacatgagtacttgtacacatatggaatatatctataatttgatccatgttcataggatactctatgaatggatacttgtatgatttgcgtggttgtttatcacaatgaaatattttggtacagtctagtatccattttacattatttatacctctgggagaaagataatttgacctgattacatttttgataaggagtagcagatttcctaatttatttcttcgcctcatataccacttaatgacaaaatcaactacataatcctcatctggaacatttagttcatcgctttctagaataagtttcatagatagataatcaaaattgtctatgatgtcatcttccagttccaaaaagtgtttggcaataaagtttttagtatgacataagagattggatagtccgtattctatacccatcatgtaacactcgacacaatattcctttctaaaatctcgtaagataaagtttatacaagtgtagatgataaattctacagaggttaatatagaagcacgtaataaattgacgacgttatgactatctatatatacctttccagtatacgagtaaataactatagaagttaaactgtgaatgtcaaggtctagacaaacccttgtaactggatctttatttttcgtgtatttttgacgtaaatgtgtgcgaaagtaaggagataactttttcaatatcgtagaattgactattatattgccacctatagcatcaataattgttttgaatttcttagtcatagacaatgctaatatattcttacagtacacagtattgacaaatatcggcatttatgtttctttaaaagtcaacatctagagaaaaatgattatctttttgagacataactcccattttttggtattcacccacacgtttttcgaaaaaattagtttttccttccaatgatatattttccatgaaatcaaacggattggtaacattataaatttttttaaatcccaattcagaaatcaatctatccgcgacgaattctatatatgttttcatcatttcacaattcattcctataagtttaactggaagagccgcagtaagaaattcttgttcaatggatactgcatctgttataatagatctaacggtttcttcactcggtggatacaataaatgtttaaacatcaaacatgcgaaatcgcagtgcagaccctcgtctctactaattagttcgttggaaaacgtgagtccgggcattaggccacgctttttaagccaaaatatggaagcgaatgatccggaaaagaagattccttctactgcagcaaaggcaataagtctctctccataaccggcgctgtcatgtatccacttttgagcccaatcggccttcttttttacacaaggcatcgtttctatggcattaaagagatagtttttttcattactatctttaacataagtatcgatcaaaagactatacatttccgaatgaatgttttcaatggccatctgaaatccgtagaaacatctagcctcggtaatctgtacttctgtacaaaatcgttccgccaaattttcattcactattccgtcactggctgcaaaaaacgccaatacatgttttataaaatatttttcgtctggtgttagtttattccaatcattgatatctttagatatatctacttcttccactgtccaaaatgatgcctctgcctttttatacatgttccagatgtcatgatattggattgggaaaataacaaatctatttggatttggtgcaaggatgggttccataactaaattaacaataacaataaattttttttcagttatctatatgcctgtacttggatcttttgtacatcgatatcgccgcaatcactacaataattacaagtattattgatagcattgttattagtactatcataattaaattatcgacattcatgggtgctgaataatcgttattatcatcattatcattttgtaattgtgacatcatactagataaatcgtttgcgagattgttgtgggaagcgggcatggaggatgcattatcattattatttaacgccttccatttggattcacaaatgttacgcacattcaacattttatggaaactataattttgtgaaaacagataacaagaaaactcgtcatcgttcaaatttttaacgatagtaaaccgattaaacgtcgagctaatttctaacgctagcgactctgttggatatgggtttccaaatatatatcttttcagttcccctacgtatctataatcatctgtaggaaatggaagatatttccatttatctactgttcctaatatcatatgtggtggtgtagtagaaccattaagcgcgaaagatgttatttcgcatcgtattttaacttcgcaataatttctggttagataacgcactctaccagtcaagtcaatgatattagcctttacagatatattcatagtagtcgtaacgatgactccatcttttagatgcgatactcctttgtatgtaccagaatcttcgtacctcaaactcgatatatttaaacaagttaatgagatattaacgcgttttatgaatgatgatatataaccagaagttttatcctcggtggctagcgctataaccttatcattataataccaactagtgtgattaatatgtgacacgtcagtgtgggtacaaatatgtacattatcgtctacgtcgtattcgatacatccgcatacagccaacaaatataaaatgacaaatactctaacgacgttcgtacccatcttgatgcggtttaataaatgttttgatttcaatttattgtaaaaaaagattcggttttatactgttcgatattctcattgcttatattttcatctatcatctccacacagtcaaatccgtggttagcatgcacctcatcaaccggtaaaagactatcggactcttctatcattataactctagaatatttaatttggtcattattaatcaagtcaattatcttatttttaacaaacgtgagtattttactcattttttataaaaacttttagaaatatacagactctatcgtgtgtctatatcttctttttatatccaatgtatttatgtctgatttttcttcatttatcatatataatggtccaaattctacacgtgcttcggattcatccagatcattaaggttcttataattgtaacatccttctcttccctcttctacatcttccttcttattcttattcttagcgtcacagaatctaccacagcaggatcccatgacgagcgtcatattaaactaatccattttcaattataatatatgattagtaatgaccattaaaataaaaaatattcttcataaccggcaagaaagtgaaaagttcacattgaaactatgtcagtagtatacatcatgaaatgatgatatatatatactctattttggtggaggattatatgatataattcgtggataatcatttttaagacacatttctttattcgtaaatcttttcacgttaaatgagtgtccatattttgcaatttcttcatatgatggcggtgtacgtggacgaggctgctcctgttcttgttgtggtcgccgactgtcgtgtctgcgtttagatccctccattatcgcgattgcgtagatggagtactattttataccttgtaattaaatttttttattaattaaacgtataaaaacgttccgtatctgtatttaagagccagatttcgtctaatagaacaaatagctacagtaaaaataactagaataattgctacacccactagaaaccacggatcgtaatacggcaatcggttttcgataataggtggaacgtatattttatttaaggacttaacaattgtctgtaaaccacaatttgcttccgcggatcctgtattaactatctgtaaaagcatatgttgaccgggcggagccgaacattctccgatatctaatttctgtatatctataatattattaacctccgcatacgcattacagttcttttctagcttggataccgcactaggtacatcgtctagatctattcctatttcttcagcgatagctcttctatccttttccggaagcaatgaaatcacttcaataaatgattcaaccatgagtgtgaaactaagtcgagaattactcatgcatttgttagttattcggagcgcgcaatttttaaactgtcctataacctctcctatatgaatagcacaagtgacattagtagggatagaatgttgagctaatttttgtaaataactatctataaaaagattatacaaagttttaaactctttagtttccgccatttatccagtctgagaaaatgtctctcataataaatttttccaagaaactaattgggtgaagaatggaaacctttaatctatatttatcacagtctgttttggtacacatgatgaattcttccaatgccgtactaaattcgatatctttttcgatttctggatatgtttttaataaagtatgaacaaagaaatggaaatcgtaataccagttatgttcaactttgaaattgttttttattttcttgttaatgattccagccacttgggaaaagtcaaagtcgtttaatgccgatttaatacgttcattaaaaacaaactttttatcctttagatgaattattattggttcattggaatcaaaaagtaagatattatcgggtttaagatctgcgtgtaaaaagttgtcgcaacagggtagttcgtagattttaatgtataacagagccatctgtaaaaagataaactttatgtattgtaccaaagatttaaatcctaatttgatagctagctcggtatctactttatctgccgaatacagtgctaggggaaaaattataatgtttcctctttcatattcgtagttagttctcttttcatgttcgaaaaagtgaaacatgcggttaaaatagtttataacattaatattactgttaataactgccggataaaagtgggatagtaatttcacgaatttgatactgtcctttctctcgttaaacgcctttaaaaaaactttagaagaatatctcaatgagagttcctgaccatccatagtttgtatcaataatagcaacatatgaagaacccgtttatacagagtatgtaaaaatgttaatttatagtttaatcccatggcccacgcacacacgattaattttttttcatctccctttagattgttgtatagaaatttgggtactgtgaactccgccgtagtttccatgggactatataattttgtggcctcgaatacaaattttactacatagttatctatcttaaagactataccatatcctcctgtagatatgtgataaaaatcgtcgtttataggataaaatcgtttatccttttgttggaaaaaggatgaattaatgtaatcattctcttctatctttagtagtgtttccttattaaaattcttaaaataatttaacaatctaactgacggagcccaattttggtgtaaatctaattgggacattatattgttaaaatacaaacagtctcctaatataacagtatctgataatctatggggagacatccattgatattcaggggatgaatcattggcaacacccatttattgtacaaaaagccccaatttacaaacgaaagtccaggtttgatagagacaaacaattaactattttgtctctgtttttaacacctccacagtttttaatttctttggtaatgaaattattcacaatatcagtatcttctttatctaccagagattttactaacttgataaccttggctgtctcattcaatagggtagtaatatttgtatgtgtgatattgatatctttttgaattgtttcttttagaagtgattctttgatggtgccagcatacgaattacaataatgcagaaactcggttaacatgcaggaattatagtaagccaattccaattgttgcctgtgttgtattagagtgtcaatatgagcaatggtgtccttgcgtttctctgatagaatgcgagcagcgattttggcgttatcatttgacgatatttctggaatgacgaatcctgtttctactaactttttggtaggacaaagtgaaacaatcaagaagatagcttctcctcctatttgtggaagaaattgaactcctctagatgatctactgacgatagtatctccttgacagatattggaccgaattacagaagtacctggaatgtaaagccctgaaaccccctcattttttaagcagattgttgccgtaaatcctgcactgtgaccaagatagagagctcctttggtgaatccatctctatgtttcagtttaaccaagaaacagtcagctggtctaaaatttccatctctatctaatacagcatctaacttgatgtcaggaactatgaccggtttaatgttatatgtaacattgagtaaatccttaagttcataatcatcactgtcatcagttatgtacgatccaaacaatgtttctaccggcatagtggatacgaagatgctatccatcagaatgtttccctgattagtattttctatatagctattcttctttaaacgattttccaaatcagtaactatgttcatttttttaggagtaggacgcctagccagtatggaagaggattttctagatcctctcttcaacatctttgatctcgatggaatgcaaaaccccatagtgaaacaaccaacgataaaaataatattgtttttcactttttataattttaccatctgactcatggattcattaatatctttataagagctactaacgtataattctttataactgaactgagatatatacaccggatctatggtttccataattgagtaaatgaatgctcggcaataactaatggcaaatgtatagaacaacgaaattatactagagttgttaaagttaatattttctatgagctgttccaataaattatttgttgtgactgcgttcaagtcataaatcatcttgatactatccagtaaaccgtttttaagttctggaatattatcatcccattgtaaagcccctaattcgactatcgaatatcctgctctgatagcagtttcaatatcgacggacgtcaatactgtaataaaggtggtagtattgtcatcatcgtgataaactactggaatatggtcgttagtaggtacagtaactttacacaacgcgatatataactttccttttgtaccatttttaacgtagttgggacgtcctgcagggtattgttttgaagaaatgatatcgagaacagatttgatacgatatttgttggattcctgattattcactataatataatctagacagatagatgattcgataaatagagaaggtatatcgttggtaggataatacatccccattccagtattctcggatactctattgatgacactagttaagaacatgtcttctattctagaaaacgaaaacatcctacatggactcattaaaacttctaacgctcctgattgtgtctcgaatgcctcgtacaaggatttcaaggatgccatagattctttgaccaacgatttagaattgcgtttagcatctgatttttttattaaatcgaatggtcggctctctggtttgctaccccaatgataacaatagtcttgtaaagataaaccgcaagaaaatttatacgcatccatccaaataaccctagcaccatcggatgatattaatgtattattatagattttccatccacagttattgggccagtatactgttagcaacggtatatcgaatagattactcatgtaacctactagaatgatagttcgtgtactagtcataatatctttaatccaatctaagaaatttaaaattagattttttacactgttaaagttaacaaaggtattacccggatacgtggatatcatatatggcattggtccattatcagtaatagctccataaactgatacggcgatggtttttatatgtgtttgatctaacgaggaagaaattcgcgcccacaattcatctctagatatgtatttaatatcaaacggtaacacatcaatttcgggacgcgtatatgtttctaaatttttaatccaaatataatgatgacctatatgccctattatcatactgtcaactatagtacacctagggaacttacgatacatctgtttcctgtaatcgttaaattttacaaatctataacatgctaaaccttttgacgacagccattcattaatttctgatatggaatctgtattctcaataccgtatcgttctaaagccagtgctatatctccctgttcgtgggaacgctttcgtataatatcgatcaacggataatctgaagtttttggagaataatatgactcatgatctatttcgtccataaacaatctagacataggaattggaggcgatgatcttaattttgtgcaatgagtcgtcaatcctataacttctaatcttgtaatattcatcatcgacataatactatctatgttatcatcgtatattagtataccatgaccttcttcatttcgtgccaaaatgatatacagtcttaaatagttacgcaatatctcaatagtttcataattgttagctgttttcatcaaggtttgtatcctgtttaacatgatggcgttctataacgtctctattttctattttttaaatttttaacgatttactgtggctagatacccaatctctctcaaatatttttttagcctcgcttacaagctgtttatctatactattaaaactgacgaatccgtgattttggtaatgggttccgtcgaaatttgccgaagtgatatgaacatattcgtcgtcaactatcaacaattttgtattattctgaatagtgaaaaccttcacagatagatcattttgaacacacaacgcatctagacttttggcggttgccatagaatatacgtcgttcttatcccaattaccaactagaagtctgatcttaactcctctattaatggctgcttctataatggagttgtaaatgtcgggccaatagtagctattaccgtcgacacgtgtagtgggaactatggccaaatgttcaatatctatactagtcttagctgacctgagtttatcaataactacatcggtatctagatctctagaatatcccaataggtgttccggagaatcagtaaagaacactccacctataggattcttaatatgatacgcagtgctaactggcaaacaacaagccgcagagcataaattcaaccatgaattttttgcgctattaaaggctttaaaagtatcaaatcttctacgaagatctgtggccagcgggggataatcagaatatacacctaacgttttaatcgtatgtatagatcctccagtaaatgacgcgtttcctacataacatctttcatcatctgacacccaaaaacaaccgagtagtagtcccacattattttttttatctatattaacggttataaaatttatatccgggcagtgactttgtagctctcccagatttcttttccctcgttcatctagcaaaactattattttaatccctttttcagatgcctcttttagtttatcaaaaataagcgctcccctagtcgtactcagaggattacaacaaaaagatgctatgtatatatatttcttagctagagtgataatttcgttaaaacattcaaatgttgtcaaatgatcggatctaaaatccatattttctggtagtgtttctaccagcctacattttgctcccgcaggtaccgatgcaaatggccacatttagttaacataaaaacttatacatcctgttctatcaacgattctagaatatcatcggctatatcgctaaaattttcatcaaagtcgacatcacaacctaactcagtcaatatattaagaagttccatgatgtcatcttcgtctatttctatatccgtatccattgtagattgttgaccgattatcgagtttaaatcattactaatactcaatccttcagaatacaatctgtgtttcattgtaaatttataggcggtgtatttaagttggtagattttcaattatgtatcaatatagcaacagtagttcttgctcctccttgattctagcatcctcttcattattttcttctacgtacataaacatgtccaatacgttagacaacacaccgacgatggcggccgccacagacacgaatatgactaaaccgatgaccatttaaaaacccctctctagctttcacttaaactgtatcgatcattcttttagcacatgtataatataaaaacattattctatttcgaatttaggcttccaaaaatttttcatccgtaaaccgataataatatatatagacttgttaatagtcggaataaatagattaatgcttaaactatcatcatctccacgattagagatacaatatttacattctttttgctgtttcgaaactttatcaatacacgttaatacaaacccaggaaggagatattgaaactgaggctgttgaaaatgaaacggtgaatacaataattcagataatgtaaaatcatgattccgtattctgatgatattagaactgctaatggatgtcgatggtatgtatctaggagtatctattttaacaaagcatcgatttgctaatatacaattatccttttgattaattgttattttattcatattcttaaaaggtttcatatttatcaattcttctacattaaaaatttccatttttaatttatgtagccccgcaatactcctcattacgtttcattttttgtctataatatccattttgttcatctcggtacatagattatccaattgagaagcgcatttagtagttttgtacattttaagtttattgacgaatcgtcgaaaactagttatagttaacattttattatttgataccctgatattaatacccctgccgttactattatttataactgatgtaacccacgtaacattggaattaattatcgatagtaatgcatcgacgcttccaaaattgtctattataaactcaccgataatttttttattacatgttttcatattcattaggattatcaaatctttaatcttattacgattgtatgcgttgatattacaagacgtcattctaaaagacggaggatttccatcaaatgccagacaatcacgtacaaagtacatggaaataggttttgttctattgcgcatcatagatttatatagaacacccgtagaaatactaatttgttttactctataaaatactaatgcatctatttcatcgttttgtataacgtctttccaagtgtcaaattccaaatttttttcattgatagtaccaaattcttctatctctttaactacttgcatagataggtaattacagtgatgcctacatgccgttttttgaaactgaatagatgcgtctagaagcgatgctacgctagtcacaatcaccactttcatatttagaatatatatatgtaaaaatatagtagaatttcattttgttttttctatgctataaatgaattctcattttgcatctgctcatactccgttttatatcaataccaaagaaggaagatatctggttctaaaagccgttaaagtatgcgatgttagaactgtagaatgcgaaggaagtaaagcttcctgcgtactcaaagtagataaaccctcatcgcccgcgtgtgagagaagaccttcgtccccgtccagatgcgagagaatgaataaccctggaaaacaagttccgtttatgaggacggacatgctacaaaatatgttcgcggctaatcgcgataatgtagcttctagacttttgtcctaaaatactattatatccttttcgatattaataaatccgtgtcgcccgggttttttatctctttcagtatgtgaatagataggtattttatctctattcatcatcgaatttaagagatccgataaacattgtttgtattctccagatgtcagcatctgatacaacaatatatgtgcacataaacctctggcacttatttcatgtaccttccccttatcactaaggagaatagtatttgagaaatatgtatacatgatattatcatgaattagatatacagaatttgtaacactctcgaaatcacacgatgtgtcggcgttaagatctaatatatcactcgataacacattttcatctagatacactagacattttttaaagctaaaatagtctttagtagtgacagtaactatgcgattattttcatcgatgatacatttcatcggcatattattacgcttaccatcaaagactataccatgtgtatatctaacgtattctagcatggttgccatacgcgcattaaacttttcaggatctttggatagatcttccaatctatctatttgagaaaacatttttatcatgttcaatagttgaaacgtcggatccactatatagatattatctataaagattttaggaactacgttcatggtatcctggcgaatattaaaactatcaatgatatgattatcgttttcatcttttatcaccatatagtttctaagatatgggattttacttaatataatattatttcccgtgataaattttattagaaaggccaaatctataagaaaagtcctagaattagtctgaagaatatctatatcgccgtatagtatatttggattaattagatatagagaatatgatccgtaacatatacaacttttattatggcgtctaagatattcttccatcaacttattaacatttttgactagggaagatacattatgacgtcccattacttttgccttgtctattactgcgacgttcatagaatttagcatatctcttgccaattcttccattgatgttacattataagaaattttagatgaaattacatttggagctttaatagtaagaactcctaatatgtccgtgtatgtggtcactaatacagattgtagttctataatcgtaaataatttacctatattatatgtttgagtctgtttagaaaagtagctaagtatacgatcttttatttctgatgcagatgtatcaacatcggaaaaaaatctttttttattcttttttactaaagatacaaatatgtctttgttaaaaacagttattttctgaatatttctagcttgtaattttaacatatgatattcgttcacactaggtactctgcctaaataggtttctataatctttaatgtaatattaggaaaagtattctgatcaggattcctattcattttgaggatttaaaactctgattattgtctaatatggtctctacgcaaactttttcacagagcgatagagtttttgataactcgtttttcttaagaaatataaaactactgtttccagagctcgctctatcttttattttatctaattcgatacaaactcctgatactggttcagaaagtaattcattaattttcagtcctttatagaagatatttaatatagataatacaaaatcttcagtttttgatatcgatctgattgatcctagaactagatatattaataacgtgctcattaggcagtttatggcagcttgataattagatatagtatattccagttcatatttattagataccgcattgcccagattttgatattctatgaattcctctgaaaataaatccaaaataactagacattctattttttgtggattagtgtactctcttccctctatcatgttcactactggtgtccacgatgataaatatctagagggaatataatatagtccataggatgccaatctagcaatgtcgaataactgtaatttgattcttcgttcttcattatgaattgattcttgaggtataaacctaacacaaattatattattagacttttcgtatgtaatgtctttcatgttataagtttttaatcctggaatagaatctattttaatgaggcttttaaacgcagagttctccaacgagtcaaagcataatactctgttgtttttcttatatacgatgttacgattttcttctttgaatggaataggtttttgaattagtttataattacaacataatagataaggaagtgtgcaaatagtacgcggaaaaaacataatagctcccctgttttcatccatggttttaagtaaatgatcactggcttctttagtcaatggatattcgaacattaaccgtttcatcatcattggacagaatccatatttcttaatgtaaagagtgatcaaatcattgtgtttattgtaccatcttgttgtaaatgtgtattcggttatcggatctgctcctttttctattaaagtatcgatgtcgatctcgtctaagaattcaactatatcgacatatttcatttgtatacacataaccattactaacgtagaatgtataggaagagatgtaacgggaacagggtttgttgattcgcaaactattctaatacataattcttctgttaatacgtcttgcacgtaatctattatagatgccaagatatctatataattattttgtaagatgatgttaactatgtgatctatataagtagtgtaataattcatgtatttcgatatatgttccaactctgtctttgtgatgtctagtttcgtaatatctatagcatcctcaaaaaatatattcgcatatattcccaagtcttcagttctatcttctaaaaaatcttcaacgtatggaatataataatctattttacctcttctgatatcattaatgatataatttttgacactatcttctgtcaattgattcttattcactatatctaagaaacggatagcgtccctaggacgaactactgccattaatatctctattatagcttctggacataattcatctattataccagaattaatgggaactattccgtatctatctaacatagttttaagaaagtcagaatctaagacctgatgttcatatattggttcatacatgaaatgatctctattgatgatagtgactatttcattctctgaaaattggtaactcattctatatatgctttccttgttgatgaaggatagaatatactcaatagaatttgtaccaacaaactgttctcttatgaatcgtatatcatcatctgaaataatcatgtaaggcatacatttaacaattagagacttgtctcctgttatcaatatactattcttgtgataatttatgtgtgaggcaaatttgtccacgttctttaattttgttatagtagatatcaaatccaatggagctacagttcttggcttaaacagatatagtttttctggaacaaattctacaacattattataaaggactttgggtagataagtgggatgaaatcctattttaattaatgcgatagccttgtcctcgtgcagatatccaaacgcttttgtgatagtatggcattcattgtctagaaacgctctacgaatatctgtgacagatatcatctttagagaatatactagtcgcgttaatagtactacaatttgtattttttaatctatctcaataaaaaaattaatatgtatgattcaatgtataactaaactactaactgttattgataactagaatcagaatctaatgatgacgtaaccaagaagtttatctactgccaatttagctgcattatttttagcatctcgtttagattttccatcggccttatcgaatactcttccgtcgatatctacacaggcataaaatgtaggagagttactaggcccaactgattcaatacgaaaagaccaatctctcttagttatttggcagtactcattaataatggtgacagggttagcatctttccaatcaataatttttttagccggaataacatcatcaaaagacttatgatcctctctcattgatttttcgcgggatacatcatctattatgacgtcagccatagcatcagcatccggcttatccgcctccgttgtcataaaccaacgaggaggaatatcgtcggagctgtacaccatagcactacgttgaagatcgtacagagctttattaacttctcgcttctccatattaagttgtctagttagttgtgcagcagtagctccttcgattccaatggttttaatagcctcacacacaatctctgcgttagaacgttcgtcgatatagattttagacatttttagagagaactaacgcaaccagcaataaaactgaacctactttatcatttttttattcatcatcctctggtggttcgtcgtttctatcaaatgtagctctgattaacccgtcatctataggtgatgctggttctggagattctggaggagatggattattatctggaagaatctctgttatttccttgttttcatgtatcgattgcgttgtaacattaagattgcgaaatgctctaaatttgggaggcttaaagtgttgtttgcaatctctacacgcgtgtctaactagtggaggttcgtcagctgctctagtttgaatcatcatcggtgtagtattcctacttttacagttaggacacggtgtattgtatttctcgtcaagaacgttaaaataatcgttgtaactcacatcctttattttatctatattgtattctactcctttcttaatgcattttataccgaataagagatagcgaaggaattctttttcggtgccgctagtacccttaatcatatcacatagtgttttatattccaaatttgtggcaatagacggtttatttctatacgatagtttgtttctggaatcctttgagtattctataccaatattattctttgattcgaatttagtttcttcgatattagattttgtattacctatattcttgatgtagtactttgatgatttttccatggcccattctattaagtcttccaagttggcatcatccacatattgtgatagtaattctcggatatcagtagcggctaccgccattgatgtttgttcattggatgagtaactactaatgtatacattttccatttataacacttatgtattaactttgttcatttatattttttcattattatgttgatattaacaaaagtgaatatatatatgttaataattgtattgtggttatacggctacaattttataatgagtgaaagtcagtgtccgatgatcaatgacgatagctttactctgaaaagaaagtatcaaatcgatagtgcggagtcaacaataaaaatggataagaagaggataaagtttcagaatagagccaaaatggtaaaagaaataaatcagacaataagagcagcacaaactcattacgagacattgaaactaggatacataaaatttaagagaatgattatgactactactctagaagatatagcaccatctattccaaataatcagaaaacttataaactattctcggacatttcagccatcggcaaagcatcacagaatccgagtaagatggtatatgctctgctgctttacatgtttcccaatttgtttggagatgatcatagattcattcgttatagaatgcatccaatgagtaaaatcaaacacaagatcttctctcctttcaaacttaatcttattagaatattagtggaagaaagattctataataatgaatgcagatctaataaatggaaaataattggaacacaagttgataaaatgttgatagctgaatctgataaatatacaatagatgcaaggtataacctaaaacccatgtatagaatcaagggagaatctgaagaagataccctctttatcaaacagatggtagaacaatgtgtgacatcccaggaattggtggaaaaagtgttgaagatactgtttagagatttgttcaagagtggagaatacaaagcgtacagatacgatgatgatgtagaaaatggatttattggattggatacactaaaattaaacattgttcatgatatagttgaaccatgtatgcctgttcgtaggccagtggctaagatactgtgtaaagaaatggtaaataaatactttgagaatccgctacatattattggtaaaaatcttcaagagtgcattgactttgttagtgaataggcatttcatctttctccaatactaattcaaattgttaaattaataatggatagtataaatagttattagtgataaaatagtaaaaataattattagaataagagtgtagtatcatagataactctcttctataaaaatggattttattcgtagaaagtatcttatatacacagtagaaaataatatagattttttaaaggatgatacattaagtaaagtaaacaattttaccctcaatcatgtactagctctcaagtatctagttagcaattttcctcaacacgttattactaaggatgtattagctaataccaatttttttgttttcatacatatggtacgatgttgtaaagtgtacgaagcggttttacgacacgcatttgatgcacccacgttgtacgttaaagcattgactaagaattatttatcgtttagtaacgcaatacaatcgtacaaggaaaccgtgcataaactaacacaagatgaaaaatttttagaggttgccgaatacatggacgaattaggagaacttataggcgtaaattatgacttagttcttaatccattatttcacggaggggaacccatcaaagatatggaaatcatttttttaaaactgtttaagaaaacagacttcaaagttgttaaaaaattaagtgttataagattacttatttgggcatacctaagcaagaaagatacaggcatagagtttgcggataatgatagacaagatatatacactctatttcaacaaactggtagaatcgtccatagcaatctaacagaaacgtttagagattatatctttcccggagataagactagctattgggtgtggttaaacgaaagtatagctaatgatgcggatatcgttcttaatagacccgccattaccatgtatgataaaattcttagttatatatactctgagataaaacaaggacgcgttaataaaaacatgcttaagttagtttatatctttgagcctgaaaaagatatcagagaacttctgctagaaatcatatatgatattcctggagatatcctatctattattgatgcaaaaaacgacgattggaaaaaatattttattagtttttataaagctaattttattaacggtaatacatttattagtgatagaacgtttaacgaggacttattcagagttgttgttcaaatagatcccgaatatttcgataatgaacgaattatgtctttattctctacgagtgctgcggacattaaacgatttgatgagttagatattaataacagttatatatctaatataatttatgaggtgaacgatatcacattagatacaatggatgatatgaagaagtgtcaaatctttaacgaggatacgtcgtattatgttaaggaatacaatacatacctgtttttgcacgagtcggatcccatggtcatagagaacggaatactaaagaaactgtcatctataaaatccaagagtagacggctgaacttgtttagcaaaaacattttaaaatattatttagacggacaattggctcgtctaggtcttgtgttagatgattataaaggagacttgttagttaaaatgataaaccatcttaagtctgtggaggatgtatccgcattcgttcgattttctacagataaaaaccctagtattctttcatcgctaatcaaaactattttagctagttataatatttccatcatcgtcttatttcaaaggtttttgagagataatctatatcatgtagaagaattcttggataaaagcatccatctaaccaagacggataagaaatatatacttcaattgataagacacggtagatcatagaacagaccaaatatattattaataatttgtatatacatagatataattatcacacatttttgataaatgggaactgctgcaacaattcagactcccaccaaattaatgaataaagaaaatgcagaaatgattttggaaaaaattgttgatcatatagttatgtatattagtgacgaatcaagtgattcagaaaataatcctgaatatattgattttcgtaacagatacgaagactatagatctctcattataaaaagtgatcacgagtttgtaaagctatgtaaaaatcatgcggagaaaagttctccagaaacgcaacaaatgattatcaaacacatatacgaacaatatcttattccagtatctgaagtactattaaaacctataatgtccatgggtgacataattacatataacggatgtaaagacaatgaatggatgctagaacaactctctaccctaaactttaacaatctccgcacatggaactcatgtagcataggcaatgtaacgcgtctgttttatacattttttagttatctgatgaaagataaactaaatatataagtataatcccattctaatactttaacctgatgtattagcatcttattagaatattaacctaactaaaagacataacataaaaactcattacatagttgataaaaagcggtaggatataaatattatggctgccaccgttccgcgttttgacgacgtgtacaaaaatgcacaaagaagaattctagatcaagaaacattttttagtagaggtctaagtagaccgttaatgaaaaacacatatctatttgataattacgcgtatggatggataccagaaactgcaatttggagtagtagatacgcaaacctagatgctagtgactattatcccatttcgttgggattacttaaaaagttcgagtttctcatgtctctatataaaggtcctattccagtatacgaagaaaaagtaaatactgaattcatagccaatggatcgttctccggtagatacgtatcatatcttcgaaagttttctgctcttccaacaaacgagtttattagttttttgttattgacctccatccctatctataatatcttgttctggtttaaaaatactcagtttgatattactaaacacacattattcagatacgtctatacagataatgccaaacacctggcgttggctaggtatatgcatcaaacaggagactataagcctttgtttagtcgtctcaaagagaattatatatttaccggtcccgttccaataagtatcaaagatatagatcaccctaatcttagtagagcaagaagtccatccgattatgagacattagctaatattagtactatattgtactttaccaagtatgatccggtattaatgtttttattgttttacgtacctgggtattcaattactacaaaaattactccagccgtagaatatctaatggataaactgaatctaacaaagagcgacgtacaactgttgtaaattattttatgcttcgtaaaatgtaggttttgaaccaaacattctttcaaagaatgagatgcataaaactttattatccaatagattgactatttcggacgtcaatcgtttaaagtaaacttcgtaaaatattctttgatcactgccgagtttaaaacttctatcgataattgtttcatatgttttaatatttacaagttttttggtccatggtacattagccggacaaatatatgcaaaataatatcgttctccaagttctatagtttctggattatttttattatattcagtaaccaaatacatattagggttatctgcggatttataatttgagtgatgcattcgactcaacataaataattctagaggagacgatctactatcaaattcggatcgtaaatctgtttctaaagaacggagaatatctatacatacctgattagaattcatccgtccttcagacaacatctcagacagtctggtcttgtatgtcttaatcatattcttatgaaacttggaaacatctcttctagtttcactagtacctttattaattctctcaggtacagattttgaattcgacgatgctgagtatttcatcgttgtatatttcttcttcgattgcataatcagattcttatataccgcctcaaactctattttaaaattattaaacaatactctattattaatcagtcgttctaactctttcgctatttctatagacttatcgacatcttgactgtctatctctgtaaacacggagtcggtatctccatacacgctacgaaaacgaaatctgtaatctataggcaacgatgttttcacaatcggattaatatctctatcgtccatataaaatggattacttaatggattggcaaaccgtaacataccgttagataactctgctccatttagtaccgattctagatacaagatcattctacgtcctatggatgtgcaactcttagccgaagcgtatgagtatagagcactatttctaaatcccatcagaccatatactgagttggctactatcttgtacgtatattgcatggaatcataaatggccttttcagttgaactggtagcctgttttagcatctttttatatctggctctctctgccaaaaatgttcttaatagtctaggaatggttccttctatcgatctatcgaaaattgctatttcagagatgaggttcggtagtctaggttcacaatgaaccgtaatatatctaggaggtggatatttctgaagcaagagctgattatttatttcttcttccaatctattggtactaacaacgacaccgactaatgtttccggagatagatttccaaagatacacacattaggatacagactgttataatcaaagattaatacattattactaaacattttttgttttggagcaaataccttaccgccttcataaggaaacttttgttttgtttctgatctaactaagatagttttagtttccaacaatagctttaacagtggacccttgatgactgtactcgctctatattcgaataccatggattgaggaagcacatatgttgacgcacccgcgtctgtttttgtttctactccataatactcccacaaatactgacacaaacaagcatcatgaatacagtatctagccatatctaaagctatgtttagattataatccttatacatctgagctaaatcaacgtcatcctttccgaaagataatttatatgtatcattaggtaaagtaggacataatagtacgactttaaatccattttcccaaatatctttacgaattactttacatataatatcctcatcaacagtcacataattacctgtggttaaaacctttgcaaatgcagcggctttgcctttcgcgtctgtagtatcgtcaccgatgaacgtcatttctctaactcctttatttaatactttacccatgcaactgaacgcgttcttggatatagaatccaatttgtacgaatccaatttttcaaatttttgaatgaatgaatatagatcgaaaaatatagttccattattgttattaacgtgaaacgtagtattggccatgccgcctactcccttatgactagactgatttctctcataaatacagagatgtacagcttcctttttgtccggagatctaaagataatcttctctcctgttaataactctagacgattagtaatatatctcagatcaaagttatgtccgttaaaggtaacgacgtagtcgaacgttagttccaacaattgtttagctattcgtaacaaaactatttcagaacatagaactagttctcgttcgtaatccatttccattagtgactgtatcctcaaacatcctctatcgacggcttcttgtatttcctgttccgttaacatctcttcattaatgagcgtaaacaataatcgtttaccacttaaatcgatataacagtaacttgtatgcgagattgggttaataaatacagaaggaaacttcttatcgaagtgacactctatatctagaaataagtacgatcttgggatatcgaatctaggtatttttttagcgaaacagttacgtggatcgtcacaatgataacatccattgttaatctttgtcaaatattgctcgtccaacgagtaacatccgtctggagatatcccgttagaaatataaaaccaactaatattgagaaattcatccatggtggcattttgtatgctgcgtttctttggctcttctatcaaccacatatctgcgacggagcattttctatctttaatatctagattataacttattgtctcgtcaatgtctatagttctcatctttcccaacggcctcgcattaaatggaggaggagacaatgactgatatatttcgtccgtcactacgtaataaaagtaatgaggaaatcgtataaatacggtctcgccatttcgacatctggatttcagatataaaaatctgttttcaccgtgactttcaaaccaattaatgcaccgaacatccatttatagaatttagaaatatattttcatttaaatgaatcccaaacattggggaagagccgtatggaccattatttttatagtactttcgcaagcgggtttagacggcaacatagaagcgtgtaaacgaaaactatatactatagttagcactcttccatgtcctgcatgtagacggcacgcgactatcgctatagaggacaataatgtcatgtctagcgatgatctgaattatatttattattttttcatcagattatttaacaatttggcatctgatcccaaatacgcgatcgatgtgacaaaggttaaccctttataaacttaacccattataaaacttatgattagtcacaactgaaataaccgcgtgattattttttggtataattctacacggcatggtttctgtgactatgaattcaacccccgttacattagtgaaatctttaacaaacagcaagggttcgtcaaagacataaaactcattgtttacaatcgaaatagaccccctatcacacttaaaataaaaaatatccttatcctttaccaccaaataaaattctgattggtcaatgtgaatgtattcacttaacagttccacaaatttatttattaactccgaggcacatacatcgtcggtattttttatggcaaactttactcttccagcatccgtttctaaaaaaatattaacgagttccatttatatcatccaatattattgaaataacgttgatggacagatgatacaaataagaaggtacggtacctttgtccaccatctcctccaattcatgctctattttgtcattaactttaatgtatgaaaacagtacgccacatgcttccatgacagtgtgtaacactttggatacaaaatgtttgacattagtataattgtccaagactgtcaatctataatagatagtagctataatatattctatgatggtattgaagaagatgacaaccttggcatattgatcatttaacacagacatggtatcaacagatagcttgaatgaaagagaatcagtaattggaataagcgtcttctcgatagagtgtccgtataccaacatgtctgatattttgatgtattccattaaattatttagttttttctttttattttcgttaaacagcatttctgtcaacggaccccaacatcgttgaccaattaagttttgattgatttttccgtgtaaggcgtatctagtcagatcgtatagcctatccaataatccatcgtctgtgtgtagatcacatcgtacactttttaattctctatagaagagcgacagacatctggagcaattacagacagcaatttctttattctctacagatgtaagatacttgaagacattcctatgatgatgcagaattttggataacacggtattgatggtatctgttaccataattcctttgatggctgatagtgtcagagcacaagatttccaatctttgacaatttttagcaccattatctttgttttgatatctatatcagacagcatggtgcgtctgacaacacagggattaagacggaaagatgaaatgattctctcaacatcttcaatggataccttgctattttttctggcattatctatatgtgcgagaatatcctctagagaatcagtatcctttttgatgatagtggatctcaatgacatgggacgtctaaaccttcttattctatcaccagattgcatggtgatttgtcttctttcttttatcataatgtaatctctaaattcatcggcaaattgtctatatctaaaatcataatatgagatgtttacctctacaaatatctgttcgtccaatgttagagtatttacatcagttttgtattccaaattaaacatggcaacggatttaattttatattcctctattaagtcctcgtcgataataacagaatgtagataatcatttaatccatcgtacatggttggaagatgcttgttgacaaaatctttaattgtcttgatgaaggtgggactatatctaacatcttgattaataaaatttataacattgtccataggatactttgtaactagttttatacacatctcttcatcggtaagtttagacagaatatcgtgaacaggtggtatattatattcatcagatatacgaagaacaatgtccaaatctatattgtttaatatattatatagatgtagcgtagctcctacaggaatatctttaactaagtcaatgatttcatcaaccgtcagatctattttaaagttaatcatataggcattgatttttaaaaggtatgtagccttgactacattctcattaattaaccattccaagtcactgtgtgtaagaagattatattctatcataagcttgactacatttggtcccgataccattaaagaattcttatgatataaggaaacagcttttaggtactcatctactctacaagaattttggagagccttaacgatatcagtgacgtttattatttcaggaggaaaaaacctaacattgagaatatcggaattaatagcttccagatacagtgattttggcaatagtccgtgtaatccataatccagtaacacgagctggtgcttgctagacaccttttcaatgtttaatttttttgaaataagctttgataaagccttcctcgcaaattccggatacatgaacatgtcggcgacatgattaagtattgttttttcattattttctcaacaagttctcaataccccaatagatgatagaatatcacccaatgcgtccatgttgtctatttccaacaggtcgctatatccaccaatagaagtttttccaaaaaagattctaggaacagttctaccaccagtaatttgttcaaaatagtcccgcaattcattttcgggtttaaattctttaatatcgacaatttcatacgctcctcttttgaaactaaacttatttagaatatccagtgcatttctacaaaaaggacatgtaaacttgacaaaaattgtcactttgttattggccaacctttgttgtacaaattcctcggccattttaatatttaagtgatataaaactatctcgacttatttaactctttagtcgagatatatggacgcagatagctatatgatagccaactacagaaggcaaacgctataaaaaacataattacgacgagcatatttataaatatttttattcagcattacttgatatagtaatattaggcacagtcaaacattcaaccactctcgatacattaactctctcattttctttaacaaattctgcaatatcttcgtaaaaagattcttgaaactttttagaatatctatcgactctagatgaaatagcgttcgtcaacatactatgttttgtatacataaaggcgcccattttaacagtttctagtgacaaaatgctagcgatcctaggatcctttagaatcacatagattgacgattcgtctctcttagtaactctagtaaaataatcatacaatctagtacgcgaaataatattatccttgacttgaggagatctaaacaatctagttttgagaacatcgataagttcatcgggaatgacatacatactatctttaatagaactcttttcatccagttgaatggattcgtccttaaccaactgattaatgagatcttctattttatcattttccagatgatatgtatgtccattaaagttaaattgtgtagcgcttctttttagtctagcagccaatactttaacatcactaatatcgatatacaaaggagatgatttatctatggtattaagaattcgtttttcgacatccgtcaaaaccaattcctttttgcctgtatcatccagttttccatcctttgtaaagaaattattttctactagactattaataagactgataaggattcctccataattgcacaatccaaactttttcacaaaactagactttacgagatctacaggaatgcgtacttcaggttttttagcttgtgattttttcttttgcggacattttctagtaaccaactcatctaccatttcattgattttagcagtgaaataagctttcaatgcacgggcactgatactattgaaaacgagttgatcttcaaattccgccatttaagttcaccaaacaacttttaaatacaaatatatcaatagtagtagaataagaactataaaaaaaataataattaaccaataccaaccccaacaaccggtattattagttgatgtggtagttttctcatcacttagaacagatttaacaatttctataaagtctgtcaaatcatcttccggagaccccataaatacaccaaatatagcggcgtacaacttatccatttatacattgaatattggcttttctttatcgctatcttcatcatattcatcatcaatatcaacaagtcccagattacgagccagatcttcttctacattttcagtcattgatacacgttcactatctccagagagtccgataacgttagccaccacttctctatcaatgattagtttcttgagcgcgaatgtaatttttgtttccgttccggatctatagaagacgataggtgtgataattgccttggccaattgtctttctcttttactgagtgattctagttcaccttctatagatctgagaatggatgattctccagtcgaaacatattctaccatggatccgtttaatttgttgatgaagatggattcatccttaaatgttttctctgtaatagtttccaccgaaagactatgcaaagaatttggaatgcgttccttgtgcttaatgtttccatagacggcttctagaagttgatacaacataggactagccgcggtaacttttatttttagaaagtatccatcgcttctatcttgtttagatttatttttataaagtttagtctctccttccaacataataaaagtggaagtcatttgactagataaactatcagtaagttttatagagatagacgaacaattagcgtattgagaagcatttagtgtaacgtattcgatacattttgcattagatttactaatcgattttgcatactctataacacccgcacaagtctgtagagaatcgctagatgcagtaggtcttggtgaagtttcaactctcttcttgattaccttactcatgattaaacctaaataattgtactttgtaatataatgatatatattttcactttatctcatttgagaataaaaatgtttttgtttaaccactgcatgatgtacagatttcggaatcgcaaaccaccagtggttttattttatccttgtccaatgtgaattgaatgggagcggatgcgggtttcgtacgtagatagtacattcccgtttttagaccgagactccatccgtaaaaatgcatactcgttagtttggaataactcggatctgctatatggatattcatagattgactttgatcgatgaaggctcccctgtctgcagccatttttatgatcgtcttttgtggaatttcccaaatagttttataaactcgcttaatatcttctggaaggtttgtattctgaatggatccaccatctgccataatcctattcttgatctcatcattccataattttctctcggttaaaactctaaggagatgcggattaactacttgaaattctccagacaatactctccgagtgtaaatattactggtatacggttccaccgactcattatttcccaaaatttgagcagttgatgcagtcggcataggtgccaccaataaactatttctaagaccgtatgttctgattttatcttttagaggttcccaattccaaagatccgacggtacaacattccaaagatcatattgtagaataccgttactggcgtacgatcctacatatgtatcgtatggtccttccttctcagctagttcacaactcgcctctaatgcaccgtaataaatggtttcgaagatcttcttatttagatcttgtgcttccaggctatcaaatggataatttaagagaataaacgcgtccgctaatccttgaacaccaataccgataggtctatgtctcttattagagatttcagcttctggaataggataataattaatatctataattttattgagatttctgacaattactttgaccacatccttcagtttgagaaaatcaaatcgcccatctattacaaacatgttcaaggcaacagatgccagattacaaacggctacctcattagcatccgcatattgtattatctcagtgcaaagattactacacttgatagttcctaaattttgttgattactctttttgttacacgcatccttataaagaatgaatggagtaccagtttcaatctgagattctataatcgctttccagacgactcgagcctttattatagatttgtatctcctttctctttcgtatagtgtatacaatcgttcgaactcgtctccccaaacattgtccaatccaggacattcatccggacacatcaacgaccactctccgtcatccttcactcgtttcataaagagatcaggaatccaaagagctataaatagatctctggttctatgttcctcgtttcctgtattctttttaagatcgaggaacgccataatatcagaatgccacggttccaagtatatggccataactccaggccgtttgtttcctccctgatctatgtatctagcggtgttattataaactctcaacattggaataataccgtttgatataccattggtaccggagatatagcttccactggcacgaatattactaattgatagacctattccccctgccattttagagattaatgcgcatcgttttaacgtgtcatagataccctctatgctatcatcgatcatgttaagtagaaaacagctagacatttggtgacgactagttcccgcattaaataaggtaggagaagcgtgcgtaaaccatttttcagaaagtagattgtacgtctcaatagctgagtctatatcccattgatgaattcctactgcgacacgcattaacatgtgctgaggtctttcaacgatcttgttgtttattttcaacaagtaggatttttccaaagttttaaaaccaaaatagttgtatgaaaagtctcgttcgtaaataataaccgagttgagtttatccttatatttgttaactatatccatggtgatacttgaaataatcggagaatgtttcccatttttaggattaacatagttgaataaatcctccatcacttcactaaatagtttttttgtttccttgtgtagatttgatacggctattctggcggctagaatggcataatccggatgttgtgtagtacaagtggctgctatttcggctgccagagtgtccaattctaccgttgttactccattatatattccttgaataaccttcatagctattttaataggatctatatgatccgtgtttaagccataacataattttctaatacgagacgtgattttatcaaacatgacattttccttgtatccatttcgtttaatgacaaacatttttgttggtgtaataaaaaaattatttaacttttcattaatagggatttgacgtatgtagcgtacaaaattatcgttcctggtatatagataaagagtcctatatatttgaaaatcgttacggctcgattaaactttaatgattgcatagtgaatatatcattaggatttaactccttgactatcagggcggcaccagaaattaccatcaaaagcattaatacagttatgccgatcgcagttagaacggttatagcatccaccatttatatctaaaaattagatcaaagaatatgtgacaaagtcctagttgtatactgagaattgacgaaacaatgtttcttacatatttttttcttattagtaactgacttaatagtaggaactggaaagctagacttgattattctataagtatagatacccttccaaataatattctctttgataaaagttccagaaaatgtagaattttttaaaaagttatcttttgctattaccaagattgtgtttagacgcttattattaatatgagtgatgaaatccacaccgcctctagatatcgcttttatttccacattagatggtaaatccaatagtgaaactatctttttaggaatgtatggactcgcgtttagaggagtgaacgtcttaggcgtcggaaaggatgattcatcaaacgaataaacaatttcacaaatggatgttaatgtattagtaggaaattttttgacgctagtggaattgaagattctaatggatgatgttctacctatttcatccgataacatgttaatttccgacaccaacggttttaatatttcgatgatatacggtagtctctctttcggacttatatagcttattccacaatacgagtcattatatactccaaaaaacaaaataactagtataaaatctgtatcgaatgggaaaaacgaaattatcgacataggtatagaatctggaacattgaacgtattaatacttaattctttttctgtggtaagtaccgataggttattgacattgtatggttttaaatattctataacttgagacttgatagatattagtgatgaattgaaaattatttttatcaccacgtgtgtttcaggatcatcgtcgacgcccgtcaaccaaccgaatggagtaaaataaatatcattaatatatgctctagatattagtatttttatcaatcctttgattatcatcttctcgtaggcgaatgattccatgatcaagagtgatttaagaacatcctccggagtattaatgggcttagtaaacagtccatcgttgcaataataaaagttatccaagttaaaggatattatgcattcgtttaaagatatcacctcatctgacggagacaattttttggtaggttttagagactttgaagctacttgtttaacaaagttattcatcgtcgtttactattctatttaattttgtagttaatttatcacatatcacattaattgactttttggtccatttttccatacgtttatattcttttaatcctgcgttatccgtttccgttatatccagggatagatcttgcaagttaaatagaatgctcttaaataatgtcatttttttatccgctaaaaatttaaagaatgtataaacttttttcaaagatttaaaacttttaggtggagttctagtacacaatatcataaacaaactaataaacatcccgcattcagattccaacagctgattaacttccacattaatacagcctattttcgctccaaatgtacattcgaaaaatctgaataaaacatcgatgtcacaatttgtattatccaatacagaatgtctgtgattcgtgttaaaaccatcggagaaggaatagaaataaaaattattatagtggtggaattcagttggaatattgcctccggagtcataaaaggatactaaacattgttttttatcataaattacacatttccaatgagacaaataacaaaatccaaacattacaaatctagaggtagaacttttaattttgtctttaagtatatacgataagatatgtttattcataaacgcgtcaaatttttcatgaatcgctaaggagtttaagaatctcatgtcaaattgtcctatataatccacttcggatccataagcaaactgagagactaagttcttaatacttcgattgctcatccaggctcctctctcaggctctattttcatcttgacgacctttggattttcaccagtatgtattcctttacgtgataaatcatcgattttcaaatccatttgtgagaagtctatcgccttagatactttttcccgtagtcgaggtttaaagaaatacgctaacggtatactagtaggtaactcaaagacatcatatatagaatggtaacgcgtctttaactcgtcggttaactctttcttttgatcgagttcgtcgctactattgggtctgctcaggtgccccgactctactagttccaacatcataccgataggaatacaagacactttgccagcggttgtagatttatcatatttctccactacatatccgttacaatttgttaaaaatttagatacatctatattgctacataatccagctagtgaatatatatgacataataaattggtaaatcctagttctggtattttactaattactaaatctgtatatctttccatttatcatggaaaagaatttaccagatatcttcttttttccaaactgcgttaatgtattctcttacaaatattcacaagatgaattcagtaatatgagtaaaacggaacgtgatagtttctcattggcggtgtttccagttataaaacatagatggcataacgcacacgttgtaaaacataaaggaatatacaaagttagtacagaagcacgtggaaaaaaagtatctcctccatcactaggaaaacccgcacacataaacctaaccgcgaagcaatatatatacagtgaacacacaataagctttgaatgttatagttttctaaaatgtataacaaatacagaaatcaattcgttcgatgagtatatattaagaggactattagaagctggtaatagtttacagatattttccaattccgtaggtaaacgaacagatactataggtgtactagggaataagtatccatttagcaaaattccattggcctcattaactcctaaagcacaacgagagatattttcagcgtggatttctcatagacctgtagttttaactggaggaactggagtgggtaagacgtcacaggtacccaagttattgctttggtttaattatttatttggtggattctctactctagataaaatcactgactttcacgaaagaccagtcattctatctcttcctaggatagctttagttagattgcatagcaataccattttaaaatcattgggatttaaggtactagatggatctcctatttctttacggtacggatctataccggaagaattaataaacaaacaaccaaaaaaatatggaattgtattttctacccataagttatctctaacaaaactatttagttatggcactcttattatagacgaagttcatgagcatgatcaaataggagatattattatagcagtagcgagaaagcatcatacgaaaatagattctatgtttttaatgactgccacgttagaggatgacagggaacggctaaaagtatttttacctaatcccgcatttatacatattcctggagatacactgtttaaaattagcgaggtatttattcataataagataaatccatcttccagaatggcatacatagaagaagaaaagagaaatttagttactgctatacagatgtatactcctcctgatggatcatccggtatagtctttgtggcatccgttgcacagtgtcacgaatataaatcatatttagaaaaaagattaccgtatgatatgtatattattcatggtaaggtcttagatatagacgaaatattagaaaaagtgtattcatcacctaatgtatcgataattatttctactccttatttggaatccagcgttactatacacaatgttacacacatttatgatatgggtagagtttttgtccccgctccttttggaggatcgcaagaatttatttctaaatctatgagagatcaacgaaaaggaagagtaggaagagttaatcctggtacatacgtctatttctatgatctgtcttatatgaagtctatacagcgaatagattcagaatttctacataattatatattgtacgctaataagtttaatctaacactccccgaagatttgtttataatccctacaaatttggatattctatggcgtacaaaggaatatatagactcgttcgatattagtacagaaacatggaataaattattatccaattattatatgaagatgatagagtatgctaaactttatgtactaagtcctattctcgctgaggagttggataactttgagaggacgggagaattaactagtattgtacgagaagccattttatctctaaatttacgaattaagattttaaattttaaacataaagatgatgatacgtatatacacttttgtaaaatattattcggtgtctataacggaacaaacgctactatatattatcatagacctctaacgggatatatgaatatgatttcagatactatatttgttcctgtagataataactaaaaatcaaactctaatgaccacatctttttttagagatgaaaaattttctacatctccttttgtagacacgactaaacattttgcagaaaaaagtttattagtgtttagataatcgtatacttcatcagtgtagatagtaaatgtgaacagataaaaggtattcttgctcaatagattggtaaattccatagaatatattaatcctttcttcttgagatcccacatcatttcaaccagagacgttttatccaatgatttacctcgtactataccacatacaaaactagattttgcagtgacgtcgtacctggtattcctaccaaacaaaattttacttttagttcttttagaaaattctaaggtagaatctctatttgccaatatgtcatctatggaattaccactagcaaaaaatgatagaaatatatattgatacatcgcagctggttttgatctactatactttaaaaacgaatcagattccataattgcctgtatatcatcagctgaaaaactatgttttacacgtattccttcggcatttctttttaatgatatatcttgtttagacaatgataaagttatcatgtccatgagagacgcgtctccgtatcgtataaatatttcattagatgttagacgcttcattaggggtatacttctataaggtttcttaatcagtccatcattggttgcgtcaagaactactatcggatgttgttgggtatctctagtgttacacatggccttactaaagtttgggtaaataactatgatatctctattaattatagatgcatatatttcatttgtcaaggatattagtatcgacttgctatcgtcattaatacgtgtaatgtaatcatataaatcatgcgatagccaaggaaaatttaaatagatgttcatcatataatcgtcgctataattcatattaatacgttgacattgactaatttgtaatatagcctcgccacgaagaaagctctcgtattcagtttcatcgataaaggataccgttaaatataactggttgccgatagtctcatagtctattaagtggtaagtttcgtacaaatacagaatccctaaaatattatctaatgttggattaatctttaccataactgtataaaatggagacggagtcataactattttaccgtttgtacttactggaatagatgaaggaataatctccggacatgctggtaaagacccaaatgtctgtttgaagaaatccaatgttccaggtcctaatctcttaacaaaaattacgatattcgatcccgatatcctttgcattctatttaccagcatatcacgaactatattaagattatctatcatgtctattctcccaccgttatataaatcgcctccgctaagaaacgttagtatatccatacaatggaatacttcatttctaaaatagtattcgttttctaattctttaatgtgaaatcgtatactagaaagggaaaaattatctttgagttttccgttagaaaagaaccacgaaactaatgttctgattgcgtccgattccgttgctgaattaatggatttacaccaaaaactcatataacttctagatgtagaagcattcgctaaaaaattagtagaatcaaaggatataagtagatgttccaacaagtgagcaattcccaagatttcatctatatcattctcgaatccgaaattagaaattcccaagtagatatcctttttcatccgatcgttgatgaaaatacgaactttattcggtaagacaatcatttactaaggagtaaaataggaagtaatgttcgtatgtcgttatcatcgtataaattaaaggtgtgttttttaccattaagtgacattataattttaccaatattggaattataatataggtgtatttgcgcactcgcgacggttgatgcatcggtaaatatagctgtatctaatgttctagtcggtatttcatcatttcgctgtctaataatagcgttttctctatctgtttccattacagctgcctgaagtttattggtcggataatatgtaaaataataagaaatacatacgaataacaaaaataaaataagatataataaagatgccatttagagatctaattttgtttaacttgtccaaattcctacttacagaagatgaggaatcgttggagatagtgtcttccttatgtagaggatttgaaatatcttatgatgacttgataacttactttccagataggaaataccataaatatatttctaaagtatttgaacatgtagatttatcggaggaattaagtatggaattccatgatacaactctgagagatttagtctatcttagattgtacaagtattccaagtgtatacggccgtgttataaattaggagataatctaaaaggcatagttgttataaaggacaggaatatttatattagagaagcaaatgatgacttgatagaatatctcctcaaggaatacactcctcagatttatacatattctaatgagcgcgtccccataactggttcaaaattaattctttgtggattttctcaagttacatttatggcgtatacaacgtcgcatataacaacaaataaaaaggtagatgttctcgtttccaaaaaatgtatagatgaactagtcgatccaataaattatcaaatacttcaaaatttatttgataaaggaagcggaacaataaacaaaatactcaggaagatattttattcggtaaccggtggccaaactccataatttgctttttctatttcggattttagaatttccaaattcaccagcgatttatcggttttggtgaaatccaaggatttattaatgtccacaaatgccatttgttttgtctgtggattgtatttgaaaatggaaacgatgtagttagatagatgcgctgcaaagtttcctattagggttccgcgctttacgtcacccagcatacttgaatcaccatcctttaaaaaaaatgataagatatcaacatggagtatatcatactcggattttaattcttctactgcatcactgacattttcacaaatactacaatacggtttaccgaaaataatcagtacgttcttcatttatgggtatcaaaaacttaaaatcgttactgctggaaaataaatcactgacgatattagatgataatttatacaaagtatacaatggaatatttgtggatacaatgagtatttatatagccgtcgccaattgtgtcagaaacttagaagagttaactacggtattcataaaatacgtaaacggatgggtaaaaaagggagggcatgtaaccctttttatcgatagaggaagtataaaaattaaacaagacgttagagacaagagacgtaaatattctaaattaaccaaggacagaaaaatgctagaattagaaaagtgtacatccgaaatacaaaatgttaccggatttatggaagaagaaataaaggcagaaatgcaattaaaaatcgataaactcacatttcaaatatatttatctgattctgataacataaaaatatcattgaatgagatactaacacatttcaacaataatgagaatgttacattattttattgtgatgaacgagacgcagaattcgttatgtgtctcgaggctaaaacacatttctctaccacaggagaatggccgttgataataagtaccgatcaggatactatgctatttgcatctactgataatcatcctaagatgataaaaaacttaactcaactgtttaaatttgttccctcggcagaggataactatttagcaaaattaacggcgttagtgaatggatgtgatttctttcctggactctatggggcatctataacacccaccaacttaaacaaaatacaattgtttagtgattttacaatcgataatatagtcactagtttggcaattaaaaattattatagaaagactaactctaccgtagacgtgcgtaatattgttacgtttataaacgattacgctaatttagacgatgtctactcgtatgttcctccttgtcaatgcactgttcaagaatttatattttccgcattagatgaaaaatggaacaattttaaatcatcttatttagagaccgttccgttaccctgccaattaatgtatgcattagaaccacgcaaggagattgatgtttcagaagttaaaactttatcatcttatatagatttcgaaaatactaaatcagatatcgatgttataaaatctatatcttcgatcttcggatattctaacgaaaactgtaacactatagtgttcggcatctataaggataatttactactgagtataaatagttcattttactttaacgatagtctgttaataaccaatactaaaagtgataatataataaatataggttactagattaaaaatggtgttccaactcgtgtgctctacgtgcggcaaagatatttctcacgaacgatataaattgattatacgaaaaaaatcattaaaggatgtactcgtcagtgtaaagaacgaatgttgtaggttaaaattatctacacaaatagaacctcaacgtaacttaacagtgcaacctctattggatataaactaatatggatccggttaattttatcaagacatatgcgcctagaggttctattatttttattaattataccatgtcattaacaagtcatttgaatccatcgatagaaaaacatgtgggtatttattatggtacgttattatcggaacacttggtagttgaatctacctatagaaaaggagttcgaatagtcccattggatagtttttttgaaggatatcttagtgcaaaagtatacatgttagagaatattcaagttatgaaaatagcagctgatacgtcattaactttattgggtattccgtatggatttggtcatgatagaatgtattgttttaaattggtagctgaatgttataaaaatgccggtattgatacatcgtctaaacgaatattaggtaaagatatttttctgagccaaaacttcacagatgataatagatggataaagatatatgattctaataatttaacattttggcaaattgattaccttaaagggtgagttaatatgcataactactcctccgttgttttttccctcgttctttttcttaacgttgtttgccatcactctcataatgtaaagatattctaaaatggtaaacttttgcatatcggacgcagaaattggtataaatgttgtaattgtattatttcccgtcaatggactagtcacagctccatcagttttatatcctttagagtatttctcactcgtgtctaacattctagagcattccatgatctgtttatcgttgatattggccggaaagatagattttttattttttattatattactattggcaattgtagatataacttctggtaaatatttttctaccttttcaatctcttctattttcaagccggctatatattctgctatattgttgctagtatcaataccttttctggctaagaagtcatatgtggtattcactatatcagttttaactggtagttccattagcctttccacttctgcagaataatcagaaattggttctttaccagaaaatccagctactataataggctcaccgatgatcattggcaaaatcctatattgtaccagattaatgagagcatatttcatttccaataattctgctagttcttgagacattgatttatttgatgaatctagttggttctctagatactctaccatttctgccgcatacaataacttgttagataaaatcagggttatcaaagtgtttagcgtggctagaatagtgggcttgcatgtattaaagaatgcggtagtatgagtaaaccgttttaacgaattatatagtctccagaaatctgtggcgttacatacatgagccgaatgacatcgaagattgtccaatatttttaatagctgctctttgtccattatttctatatttgactcgcaacaattgtagataccattaatcactgattcctttttcgatgccggacaatagcacaattgtttagctttggactctatgtattcagaattaatagatatatctctcaatacagattgcactatacattttgaaactatgtcaaaaattgtagaacgacgctgttctgcagccatttaactttaaataatttacaaaaatttaaaatgagcatccgtataaaaatcgataaactgcgccaaattgtggcatatttttcagagttcagtgaagaagtatctataaatgtagactcgacggatgagttaatgtatatttttgccgccttgggcggatctgtaaacatttgggccattatacctctcagtgcatcagtgttctaccgcggagccgaaaacattgtgtttaatcttcctgtgtccaaggtaaaatcgtgtttgtgtagttttcacaatgatgccatcatagatatagaacctgatctggaaaataatctagtaaaactttctagttatcatgtagtaagtgtcgattgtaacaaggaactgatgcctattaggacagatactactatttgtctaagtatagatcaaaagaaatcttacgtgtttaattttcacaagtatgaagaaaaatgttgtggtagaaccgtcattcatttagaatggttgttgggctttatcaagtgtattagtcagcatcagcatttggctattatgtttaaagatgacaatattattatgaagactcctggtaatactgatgcgttttccagggaatattctatgactgaatgttctcaagaactacaaaagttttctttcaaaatagctatctcgtctctcaacaaactacgaggattcaaaaagagagtcaatgtttttgaaactagaatcgtaatggataatgacgataacattctaggaatgttgttttcggatagagttcaatcctttaagatcaacatctttatgacgtttttagattaatactttcaatgagataaatatgggtggcagagtaagtgttgagctccctaaacgggatccgcctccgggagtacccactgatgagatgttattaaacgtggataaaatgcatgacgtgatagctcccgctaagcttttagaatatgtgcatataggaccactagcaaaagataaagaggataaagtaaagaaaagatatccagagtttagattagtcaacacaggacccggtggtctttcggcattgttaagacaatcgtataatggaaccgcacccaattgctgtcgcacttttaatcgtactcattattggaaaaaggatggaaagatatcagataagtatgaagagggtgcagtattagaatcgtgttggccagacgttcacgacactggaaaatgcgatgttgatttattcgactggtgtcagggggatacgttcgatagaaacatatgccatcagtggatcggttcagcctttaataggagtgatagaactgtagagggtcaacaatcgttaataaatctgtataataagatgcaaacattatgtagtaaagatgctagtgtaccaatatgtgaatcatttttgcatcatttacgcgcacacaatacagaagatagcaaagagatgatcgattatattctaagacaacagtctgcggactttaaacagaaatatatgagatgtagttatcccactagagataagttagaagagtcattaaaatatgcggaacctcgagaatgttgggatccagagtgttcgaatgccaatgttaatttcttactaacacgtaattataataatttaggactttgcaatattgtacgatgtaatactagcgtgaacaacttacagatggataaaacttcctcattaagattgtcatgtggattaagcaatagtgatagattttctactgttcccgtcaatagagcaaaagtagttcaacataatattaaacattcgttcgacctaaaattgcatttgatcagtttattatctctcttggtaatatggatactaattgtagctatttaaatgggtgccgcggcaagcatacagacgacggtgaatacactcagcgaacgtatctcgtctaaattagaacaagaagcgaacgctagtgctcaaacaaaatgtgatatagaaatcggaaatttttatatccgacaaaaccatggatgtaacctcactgttaaaaatatgtgctctgcggacgcggatgctcagttggatgctgtgttatcagccgctacagaaacatatagtggattaacaccggaacaaaaagcatacgtaccagctatgtttactgctgcgttaaacattcagacgagtgtaaacactgttgttagagattttgaaaattatgtgaaacagacttgtaattctagcgcggtcgtcgataacaaattaaagatacaaaacgtaatcatagatgaatgttacggagccccaggatctccaacaaatttggaatttattaatacaggatctagcaaaggaaattgtgccattaaagcgttgatgcaattgacgactaaggccactactcaaatagcacctagacaagttgctggtacaggagttcagttttatatgattgttatcggtgttataatattggcagcgttgtttatgtactatgccaagcgtatgttgttcacatccaccaatgataaaatcaaacttattttagccaataaggaaaacgtccattggactacttacatggacacattctttagaacttctccgatggttattgctaccacggatatgcaaaactgaaaatatattgataatattttaatagattaacatggaagttatcgctgatcgtctagacgatatagtgaaacaaaatatagcggatgaaaaatttgtagattttgttatacacggtctagagcatcaatgtcctgctatacttcgaccattaattaggttgtttattgatatactattatttgttatagtaatttatatttttacggtacgtctagtaagtagaaattatcaaatgttgttggtggcgctagtcatcacattaactattttttattactttatactataatagtactagactgacttctaacaaacatctcacctgccataaataaatgcttgatattaaagtcttctatttctaacactattccatctgtggaaaataatactctgacattatcgctaattgacacatcggtgagtgatatgcctataaagtaataatcttctttgggcacatataccagtgtaccaggttctaacaacctatttactggtgctcctgtagcatactttttctttaccttgagaatatccatcgtttgcttggtcaatagcgatatgtgattttttatcaaccactcaaaaaagtaattggagtgttcatatcctctacgggctattgtctcatggccgtgtatgaaatttaagtaacacgactgtggtagatttgttctatagagccggttgccgcaaatagatagaactaccaatatgtctgtacaaatgttaaacattaattgattaacagaaaaaacaatgttcgttctgggaatagaaaccagatcaaaacaaaattcgttagaatatatgccacgtttatacatggaatataaaataactacagtttgaaaaataacagtatcatttaaacatttaacttgcggggttaatttcacaactttactgtttttaaactgttcaaaatatagcatcgatccatgagaaatacgtttagccgcctttaatagaggaaatcccaccgcctttctggatctcaccaacgacgatagttctgaccagcaacttatttcttcatcatccacctgttttaacatataataggcaggagatagatatccgtcattgcaatattccttttcgtaggcacacaatctaatattgataaaatctccattctcttctctgcatttattatcttgtttcggtggctgattaggctgtagtcttggtttaggctttggtatatcgttgttgaatctattttggtcattaaatctttcatttcttcctggtatatttttatcacctcgtttggttggatttttgtctatattatcgtttgtaacatcggtacgggtattcatttatcacaaaaaaaacttctctaaatgagtctactgctagaaaacctcatcgaagaagataccatattttttgcaggaagtatatctgagtatgatgatttacaaatggttattgccggcgcaaaatccaaatttccaagatctatgctttctatttttaatatagtacctagaacgatgtcaaaatatgagttggagttgattcataacgagaatatcacaggggcaatgtttaccacaatgtataatataagaaacaatttgggtctaggagatgataaactaactattgaagccattgaaaactatttcttggatcctaacaatgaggttatgcctcttatcattaataatacggatatgactgccgtcattcctaaaaaaagtggtaggagaaagaataagaacatggttattttccgtcaaggatcatcacctatcttgtgtattttcgaaactcgtaaaaagattaatatttataaagaaaatatggaatccgcgtcgactgagtatacacctatcggagacaacaaggctttgatatctaaatatgcgggaattaatgtcctgaatgtgtattctccttccacatccatgagattgaatgccatttacggattcaccaataaaaataaactagagaaacttagtactaataaggaactagaatcgtatagttctagccctcttcaagaacccattaggttaaatgattttctgggactattggaatgtgttaaaaagaatattcctctaacagatattccgacaaaggattgattactataaatggagaatgttcctaatgtatactttaatcctgtgtttatagagcccacgtttaaacattctttattaagtgtttataaacacagattaatagttttatttgaagtattcattgtattcattctaatatatgtattttttagatctgaattaaatatgttcttcatgcctaaacgaaaaatacccgatcctattgatagattacgacgtgctaatctagcgtgtgaagacgataaattaatgatctatggattaccatggatgacaactcaaacatctgcgttatcaataaatagtaaaccgatagtgtataaagattgtgcaaagcttttgcgatcaataaatggatcacaaccagtatctcttaacgatgttcttcgcagatgatgattcattttttaagtatttggctagtcaagatgatgaatcttcattatctgatatattgcaaatcactcaatatctagactttctgttattattattgatccaatcaaaaaataaattagaagccgtgggtcattgttatgaatctctttcagaggaatacagacaattgacaaaattcacagactttcaagattttaaaaaactgtttaacaaggtccctattgttacagatggaagggtcaaacttaataaaggatatttgttcgactttgtgattagtttgatgcgattcaaaaaagaatcctctctagctaccaccgcaatagatcctattagatacatagatcctcgtcgcgatatcgcattttctaacgtgatggatatattaaagtcgaataaagtgaacaataattaattctttattgtcatcatgaacggcggacatattcagttgataatcggccccatgttttcaggtaaaagtacagaattaattagacgagttagacgttatcaaatagctcaatataaatgcgtgactataaaatattctaacgataatagatacggaacgggactatggacgcatgataagaataattttgaagcattggaagcaactaaactatgtgatgtcttggaatcaattacagatttctccgtgataggtatcgatgaaggacagttctttccagacattgttgaattctgtgagcgtatggcaaacgaaggaaaaatagttatagtagccgcactcgatgggacatttcaacgtaaaccgtttaataatattttgaatcttattccattatctgaaatggtggtaaaactaactgctgtgtgtatgaaatgctttaaggaggcttccttttctaaacgattgggtgaggaaaccgagatagaaataataggaggtaatgatatgtatcaatcggtgtgtagaaagtgttacatcgactcataatattatattttttatctaaaaaactaaaaataaacattgattaaattttaatataatacttaaaaatggatgttgtgtcgttagataaaccgtttatgtattttgaggaaattgataatgagttagattacgaaccagaaagtgcaaatgaggtcgcaaaaaaactaccgtatcaaggacagttaaaactattactaggagaattattttttcttagtaagttacagcgacacggtatattagatggtgccaccgtagtgtatataggatcggctcctggtacacatatacgttatttgagagatcatttctataatttaggagtgatcatcaaatggatgctaattgacggccgccatcatgatcctattttaaatggattgcgtgatgtgactctagtgactcggttcgttgatgaggaatatctacgatccatcaaaaaacaactgcatccttctaagattattttaatttctgatgtaagatccaaacgaggaggaaatgaacctagtacggcggatttactaagtaattacgctctacaaaatgtcatgattagtattttaaaccccgtggcatctagtcttaaatggagatgcccgtttccagatcaatggatcaaggacttttatatcccacacggtaataaaatgttacaaccttttgctccttcatattcagctgaaatgagattattaagtatttataccggtgagaacatgagactgactcgagttaccaaattagacgctgtaaattatgaaaaaaagatgtactaccttaataagatcgtccgtaacaaagtagttgttaactttgattatcctaatcaggaatatgactattttcacatgtactttatgctgaggaccgtgtactgcaataaaacatttcctactactaaagcaaaggtactatttctacaacaatctatatttcgtttcttaaatattccaacaacatcaactgaaaaagttagtcatgaaccaatacaacgtaaaatatctagcaaaaattctatgtctaaaaacagaaatagcaagagatccgtacgcggtaataaatagaaacgtgctactgagatatactaccgatatagagtataatgatttagttactttaataaccgttagacataaaattgattctatgaaaactgtgtttcaggtatttaacgaatcatccataaattatactccggttgatgatgattatggagaaccaatcattataacatcgtatcttcaaaaaggtcataacaagtttcctgtaaattttctatacatagatgtggtaatatctgacttatttcctagctttgttagactagatactacagaaactaatatagttaatagtgtactacaaacaggcgatggtaaaaagactcttcgtcttcccaaaatgttagagacggaaatagttgtcaagattctctatcgccctaatataccattaaaaattgttagatttttccgcaataacatggtaactggagtagagatagccgatagatctgttatttcagtcgctgattaatcaattagtagagatgagataagaacattataataatcaataatattatcttatatctcgtttagaaaaatgctaatattaaaatagctaacgctagtaatccaatcggaagccatttgatatctataatagggtatctaatttcctgattcagatagcggacagctatattctcggtagctactcgtttggaatcacaaacattatttacatctaatttactatctgtaatggaaacgtttcccaatgaaatggtacaatccgatacattgcattttgttatatttttttttaaagaggctggtaacaacgcatcgcttcgtttacatggctcgtaccaacaataatagggtaatcttgtatctattcctatccgtactatgcttttatcaggataaatacatttacatcgtatatcgtctttgttagcatcacagaatgcataaatttgttcgtccgtcatgataaaaatttaaagtgtaaatataactattatttttatagttgtaataaaaagggaaatttgattgtatactttcggttctttaaaagaaactgacttgataaaaatggctgtaatctctaaggttacgtatagtctatatgatcaaaaagagattaatgctacagatattatcattagtcatgttaaaaatgacgacgatatcggtaccgttaaagatggtagactaggtgctatggatggggcattatgtaaaacttgtgggaaaacggaattggaatgtttcggtcactggggtaaagtaagtatttataaaactcatatagttaagcctgaatttatttcagaaattattcgtttactgaatcatatatgtattcactgcggattattgcgttcacgagaaccgtattccgacgatattaacctaaaagagttatcgggacacgctcttaggagattaaaggataaaatattatccaagaaaaagtcatgttggaacagcgaatgtatgcaaccgtatcaaaaaattactttttcaaagaaaaaggtttgtttcgtcaacaagttggatgatattaacgttcctaattctctcatctatcaaaagttaatttctattcatgaaaagttttggccattattagaaattcatcaatatccagctaacttattttatacagactactttcccatccctccgctgattattagaccggctattagtttttggatagatagtatacccaaagagaccaatgaattaacttacttattaggtatgatcgttaagaattgtaacttgaatgctgatgaacaggttatccagaaggcggtaatagaatacgatgatattaaaattatttctaataacactaccagtatcaatttatcatatattacatccggcaaaaataatatgattagaagttatatcgtcgcccgacgaaaagatcagaccgctagatctgtaattggtcccagtacatctatcaccgttaatgaggtaggaatgcccgcatatattagaaatacacttacagaaaagatatttgttaatgcctttacagtggataaagttaaacaactattagcgtcaaaccaagttaaattttactttaataaacgattaaaccaattaacaagaatacgccaaggaaagtttatcaaaaataaaatacatttattgcctggtgattgggtagaagtagctgttcaagaatatacaagtattatttttggaagacagccgtctctacatagatacaacgtcatcgcttcatctatcagagctaccgaaggagatactatcaaaatatctcccggaattgccaactctcaaaatgctgatttcgacggagatgaagaatggatgatattggagcaaaatcctaaagccgtaattgaacaaagtattcttatgtatccgacgacgttactcaaacacgatattcatggagcccccgtttatggatctattcaagatgaaatcgtagcagcgtattcattgtttaggatacaagatctttgtttagatgaagtattgaacatcttggggaaatatggaagagagttcgatcctaaaggtaaatgtaaattcagcggtaaagatatctatacttacttgataggtgaaaagattaattatccgggtctcttaaaggatggtgaaattattgcaaacgacgtagatagtaattttgttgtggctatgaggcatctgtcattggctggactcttatccgatcataagtcgaacgtggaaggtatcaactttattatcaagtcatcttatgtttttaagagatatctatctatttacggttttggggtgacattcaaagatctgagaccaaattcgacgttcactaataaattggaggccatcaacgtagaaaaaatagaacttatcaaagaagcatacgccaaatatctcaacgatgtaagagacgggaaaatagttccattatctaaagctttagaggcggactatgtggaatccatgttatccaacttgacaaatcttaatatccgagagatagaagaacatatgagacaaacgctgatagatgatccagataataacctcctgaaaatggccaaagcgggttataaagtaaatcctacagaactaatgtatattctaggtacgtatggacaacaaaggattgatggtgaaccagcagagactcgagtattgggtagagtcttaccttactatcttccagactctaaggatccagaaggaagaggttacattcttaattctttaacaaaaggattaacgggttctcaatattacttttcgatgctggttgccagatctcaatctactgatatcgtctgtgaaacatcacgtaccggaacactggctagaaaaatcattaaaaagatggaggatatggtggtcgacggatacggacaagtagttataggtaatacgctcatcaagtacgccgccaattataccaaaattctaggctcagtatgtaaacctgtagatcttatctatccagatgagtccatgacttggtatttggaaattagtgctctgtggaataaaataaaacagggattcgtttactctcagaaacagaaacttgcaaagaagacattggcgccgtttaatttcctagtattcgtcaaacccaccactgaggataatgctattaaggttaaggatctgtacgatatgattcataacgtcattgatgatgtgagagagaaatacttctttacggtatctaatatagattttatggagtatatattcttgacgcatcttaatccttctagaattagaattacaaaagaaacggctatcactatctttgaaaagttctatgaaaaactcaattatactctaggtggtggaactcctattggaattatttctgcacaggtattgtctgagaagtttacacaacaagccctgtccagttttcacactactgaaaaaagtggtgccgtcaaacaaaaacttggtttcaacgagtttaataacttgactaatttgagtaagaataagaccgaaattatcactctggtatccgatgatatctctaaacttcaatctgttaagattaatttcgaatttgtatgtttgggagaattaaatccagacatcactcttcgaaaagaaacagataaatatgtagtagatataatagttaatagattatacatcaagagagcagaaataaccgaattagttgtcgaatatatgattgaacgatttatctcctttagcgtcattgtaaaggaatggggtatggagacattcattgaggacgaggataatattagatttactgtctacctaaatttcgttgaaccggaagaattgaatcttagtaagtttatgatggttcttccgggtgccgccaacaagggcaagattagtaaattcaagattcctatctctgattatacgggttatgacgacttcaatcaaacaaaaaagctcaataagatgactgtagaactcatgaatctaaaagaattgggttctttcgatttggaaaacgtcaacgtgtatcctggagtatggaatacatacgatatcttcggtatcgaggccgctcgtgaatacttgtgcgaagccatgttaaacacctatggagaagggttcgattatctgtatcagccttgtgatcttctcgctagtttactatgtgctagttacgaaccagaatcagttaataaattcaagttcggtgcagctagtactcttaagagagctacgttcggagacaataaagcattgttaaacgcggctcttcataaaaagtcagaacctattaacgataatagtagctgccacttttttagcaaggtccctaatataggaactggatattacaaatactttatcgacttgggtcttctcatgagaatggaaaggaaactatctgataagatatcttctcaaaagatcaaggaaatggaagaaacagaagacttttaattcttatcaataacatatttttctatgatctgtcttttaaacgatggattttccacaaatgcgcctctcaagtccctcatagaatgatacacgtataaaaaatatagcataggcaatgactccttatttttagacattagatatgccaaaatcatagccccgcttctatttactcccgcagcacaatgaaccaacacgggctcgtttcgttgatcacatttagataaaaaggcggttacgtcgtcaaaatatttactaatatcggtagttgtatcatctaccaacggtatatgaataatattaatattagagttaggtaatgtatatttatccatcgtcaaatttaaaacatatttgaacttaacttcagatgatggtgcatccatagcatttttataatttcccaaatacacattattggttacccttgtcattatagtgggagatttggctttgtgcatatctccagttgaacgtagtagtaagtatttatacaaacttttcttatccatttataacgtacaaatggataaaactactttatcggtaaacgcgtgtaatttagaatacgttagagaaaaggctatagtaggcgtacaagcagccaaaacatcaacacttatattctttgttattatattggcaattagtgcgctattactctggtttcagacgtctgataatccagtctttaatgaattaacgagatatatgcgaattaaaaatacggttaacgattggaaatcattaacggatagcaaaacaaaattagaaagtgatagaggtagacttctagccgctggtaaggatgatatattcgacttcaaatgtgtggatttcggcgcctattttatagctatgcgattggataagaaaacatatctgccgcaagctattaggcgaggtactggagacgcgtggatggttaaaaaggcggcaaaggtcgatccatctgctcaacaattttgtcagtatttgataaaacacaagtctaataatgttattacttgtggtaatgagatgttaaatgaattaggttatagcggttattttatgtcaccgcattggtgttccgattttagtaatatggaatagtgttagataaatgcggtaacgaatgttcctgtaaggaaccataacagtttagatttaacgttaaagatgagcataaacataataaacaaaattacaatcaaacctataacattaatatcaaacaatccaaaaaatgaaatcagtggagtagtaaacgcgtacataactcctggataacgtttagcagctgccgttcctattctagaccaaaaattcggtttcatgttttcgaagcggtgttctgcaacaagtcggggatcgtgttctacatatttggcggcgttatccagtatctgcctattgatcttcatttcgttttcgattctggctatttcaaaataaaatcccgatgatagacctccagactttataatttcatctacgatgttcagcgccgtagtaactctaataatataggctgataagctaacatcataccctcctgtatatgtgaatatggcatgatttttgtccattacaagctcggttttaactttattgcctgtaataatttctctcatctgtaggatatctatttttttgtcatgcattgccttcaagacgggacgaagaaacgtaatatcctcaataacgttatcgttttctacaataactacatattctacctttttattttctaactcggtaaaaaaattagaatcccatagggctaaatgtctagcgatatttcttttcgtttcctctgtacacatagtgttacaaaaccctgaaaagaagtgagtatacttgtcatcatttctaatgtttcctccagtccactgtataaacgcataatccttgtaatgatctggatcatccttgactaccacaacatttcttttttctggcataacttcgttgtcctttacatcatcgaacttctgatcattaatatgctcatgaacattaggaaatgtttctgatggaggtctatcaataactggcacaacaataacaggagttttcaccgccgccatttagttattgaaattaatcatatacaactctttaatacgagttatattttcgtctatccattgtttcacatttacatatttcgacaaaaagatataaaatgcgtattccaatgcttctctgtttaatgaattactaaaatatacaaacacgtcactgtctggcaataaatgatatcttagaatattgtaacaatttattttgtattgcacatgttcgtgatctatgagttcttcttcgaatggcataggatctccgaatctgaaaacgtataaataggagttagaataataatatttgagagtattggtaatatataaactctttagcggtataattagtttttttctctcaatttctatttttagatgtgatggaaaaatgactaattttgtagcattagtatcatgaactctaatcaaaatcttaatatcttcgtcacacgttagctctttgaagtttttaagagatgcatcagttggttctacagatggagtaggtgcaacaattttttgttctacacatgtatgtactggagccattgttttaactataatggtgcttgtatcgaaaaactttaatgcagatagcggaagctcttcgccgcgactttctacatcgtaattgggttctaacgccgatctctgaatggatactagttttctaagttctaatgtgattctctgaaaatgtaaatccaattcctccggcattatagatgtgtatacatcggtaaataaaactatagtatccaacgatcccttctcgcaaattctagtcttaaccaaaaaatcgtatataaccacggagatggcgtatttaagagtggattcttctaccgttttgttcttggatgtcatataggaaactataaagtccgcactactgttaagaatgattactaacgcaactatatagttcaaattaagcattttggaaacataaaataactctgtagacgatacttgactttcgaataagtttgcagacaaacgaagaaagaacagacctctcttaatttcagaagaaaactttttttcgtattcctgacgtctagagtttatatcaataagaaagttaagaattagtcggttaatgttgtatttcattacccaagtttgagatttcataatattatcaaaagacatgataatattaaagataaagcgctgactatgaacgaaatagctatatggttcgctcaaaaatatagtcttgttaaacgtggaaacgataactgtatttttaatcacgtcagcggcatctaaattaaatataggtatatttattccacacactctacaatatgccacaccatcttcataataaataaattcgttagcaaaattattaattttagtgaaatagttagcgtcaactttcatagcttccttcaatctaatttgatgctcacacggtgcgaattccactctaacatcccttttccatgcctcaggttcatcgatctctataatatctagttttttgcgtttcacaaacacaggctcgtctctcgcgatgagatctgtatagtaactatgtaaatgataactagatagaaagatgtagctatatagatgacgatcctttaagagaggtataataactttaccccaatcagatagactgttgttatggtcttcggaaaaagaatttttataaatttttccagtattttccaaatatacgtacttaacatctaaaaaatccttaatgataataggaatggataatccgtctattttataaagaaatacatatcgcacattatacttttttttggaaatgggaataccgatgtgtctacataaatatgcaaagtctaaatattttttagagaatcttaattggtccaaattcttttccaagtacggtaatagatttttcatattgaacggtatcttcttaatctctggttctagttccgcattaaatgatgaaactaagtcactatttttataactaacgattacatcacctctaacatcatcatttaccagaatactgatcttcttttgtcgtaaatacatgtctaatgtgttaaaaaaaagatcatacaagttatacgtcatttcatctgtggtattcttgtcattgaaggataaactcgtactaatctcttctttaacagcctgttcaaatttatatcctatatacgaaaaaatagcaaccagtgtttgatcatccgcgtcaatattctgttctatcgtagtgtataacaatcgtatatcttcttctgtgatagtcgatacgttataaaggttgataacgaaaatatttttatttcgtgaaataaagtcatcgtaggattttggacttatattcgcgtctagtagatatgcttttatttttggaatgatctcaattagaatagtctctttagagtccatttaaagttacaaacaactaggaaattggtttatgatgtataatttttttagtttttatagattctttattctatacttaaaaaatgaaaataaatacaaaggttcttgagggttgtgttaaattgaaagcgagaaataatcataaattatttcattatcgcgatatccgttaagtttgtatcgtaatggcgtggtcaattacaaataaagcggatactagtagcttcacaaagatggctgaaatcagagctcatctaaaaaatagcgctgaaaataaagataaaaacgaggatattttcccggaagatgtaataattccatctactaagcccaaaaccaaacgagccactactcctcgtaaaccagcggctactaaaagatcaaccaaaaaggaggaagtggaagaagaagtagttatagaggaatatcatcaaacaactgaaaaaaattctccatctcctggagtcagcgacattgtagaaagcgtggccgctgtagagctcgatgatagcgacggggatgatgaacctatggtacaagttgaagctggtaaagtaaatcatagtgctagaagcgatctctctgacctaaaggtggctaccgacaatatcgttaaagatcttaagaaaattattactagaatctctgcagtatcgacggttctagaggatgttcaagcagctggtatctctagacaatttacttctatgactaaagctattacaacactatctgatctagtcaccgagggaaaatctaaagttgttcgtaaaaaagttaaaacttgtaagaagtaaatgcgtgcacttttttataaagatggtaaactctttaccgataataattttttaaatcctgtatcagacgataatccagcgtatgaggttttgcaacatgttaaaattcctactcatttaacagatgtagtagtatatgaacaaacgtgggaggaggcgttaactagattaatttttgtgggaagtgattcaaaaggacgtagacaatacttttacggaaaaatgcatgtacagaatcgcaacgctaaaagagatcgtatttttgttagagtatataacgttatgaaacgaattaattgttttataaacaaaaatataaagaaatcgtccacagattccaattatcagttggcggtttttatgttaatggaaactatgttttttattagatttggtaaaatgaaatatcttaaggagaatgaaacagtagggttattaacactaaaaaataaacacatagaaataagtcccgatgaaatagttatcaagtttgtaggaaaggacaaagtttcacatgaatttgttgttcataagtctaatagactatataagccgctattgaaactgacggatgattctagtcccgaagaatttctgttcaacaaactaagtgaacgaaaggtatatgaatgtatcaaacagtttggtattagaatcaaggatctccgaacgtatggagtcaattatacgtttttatataatttttggacaaatgtaaagtccatatctcctcttccatcaccaaaaaagttaatagcgttaactatcaaacaaactgctgaagtggtaggtcatactccatcaatttcaaaaagagcttatatggcaacgactattttagaaatggtaaaggataaaaattttttagatgtagtatctaaaactacgttcgatgaattcctatctatagtcgtagatcacgttaaatcatctacggatggatgatatagatctttacacaaataattacaaaaccgataaatggaaatggataagcgtatgaaatctctcgcaatgacagctttcttcggagagctaaacacattagatattatggcattgataatgtctatatttaaacgccatccaaacaataccattttttcagtggataaggatggtcagtttatgattgatttcgaatacgataattataaggcttctcaatatttggatctgaccctcactccgatatctggagatgaatgcaagactcacgcatcgagtatagccgaacaattggcgtgtgtggatattattaaagaggatattagcgaatatatcaaaactactccccgtcttaaacgatttataaaaaaataccgcaatagatcagatactcgcatcagtcgagatacagaaaagcttaaaatagctctagctaaaggcatagattacgaatatataaaagacgcttgttaataagtaaatgaaaaaaaactagtcgtttataataaaacacgatatggatgccaacgtagtatcatcttctactattgcgacgtatatagacgctttagcgaagaatgcttcggaattagaacagaggtctaccgcatacgaaataaataatgaattggaactagtatttattaagccgccattaattactttgacaaatgtagtgaatatctctacgattcaggaatcgtttattcgatttaccgttactaataaggaaggtgtcaaaattagaactaagattccattatctaaggtacatggtctagatgtaaaaaatgtacagttagtagatgctatagataacatagtttgggaaaagaaatcattagtgacggaaaatcgtcttcacaaagaatgcttgttgagactatcgacagaggaacgtcatatatttttggattacaagaaatatggatcctctatccgactagaattagtcaatcttattcaagcaaaaacaaaaaactttacgatagactttaagctaaaatattttctaggatccggtgcccaatctaaaagttctttgttgcacgctattaatcatccaaagtcaaggcctaatacatctctggaaatagaattcacacctagagacaatgaaaaagttccatatgatgaactaataaaggaattgacgactctatcacgtcatatatttatggcttctccagagaatgtaattctttctccgcctattaacgcacctataaagacttttatgttgcctaaacaagatatagtaggtctggatctggaaaatctatatgccgtaactaagactgacggcattcctataactatcagagttacatcaaacgggttgtattgttattttacacatcttgggtatattattagatatccagttaagagaataatagattccgaagtagtagtctttggtgaggcagttaaggataagaactggaccgtatatctcattaagctaatagagcctgtgaatgcaatcaatgatagactagaagaaagtaagtatgttgaatctaaactagtggatatttgtgatcggatagtattcaagtcaaagaaatatgaaggtccgtttactacaactagtgaagtcgtcgatatgttatctacatatttaccaaagcaaccagaaggtgttattctgttctattcaaagggacctaaatctaacattgattttaaaattaaaaaggaaaatactatagaccaaactgcaaatgtagtatttaggtacatgtccagtgaaccaattatctttggagaatcgtctatctttgtagagtataagaaatttagcaacgataaaggctttcctaaagaatatggttctggtaagattgtgttatataacggcgttaattatctaaataatatctattgtttggaatatattaatacacataatgaagtgggtattaagtccgtggttgtacctattaagtttatagcagaattcttagttaatggagaaatacttaaacctagaatcgataaaaccatgaaatatattaactcagaagattattatggaaatcaacataatatcatagtcgaacatttaagagatcaaagcatcaaaataggagatatctttaacgaggataaactatcggatgtgggacatcaatacgccaataatgataaatttagattaaatccagaagttagttattttacgaataaacgaactagaggaccgttgggaattttatcaaactacgtcaagactcttcttatttctatgtattgttccaaaacatttttagacgattccaacaaacgaaaggtattggcgattgattttggaaacggtgctgacctggaaaaatacttttatggagagattgcgttattggtagcgacggatccggatgctgatgctatagctagaggaaatgaaagatacaacaaattaaactctggaattaaaaccaagtactacaaatttgactacattcaggaaactattcgatccgatacatttgtctctagtgtcagagaagtattctattttggaaagtttaatatcatcgactggcagtttgctatccattattcttttcatccgagacattatgctaccgtcatgaataacttatccgaactaactgcttctggaggcaaggtattaatcactaccatggacggagacaaattatcaaaattaacagataaaaagacttttataattcataagaatttacctagtagcgaaaactatatgtctgtagaaaaaatagctgatgatagaatagtggtatataatccatcaacaatgtctactccaatgactgaatacattatcaaaaagaacgatatagtcagagtgtttaacgaatacggatttgttcttgtagataacgttgatttcgctacaattatagaacgaagtaaaaagtttattaatggcgcatctacaatggaagatagaccgtctacaaaaaactttttcgaactaaatagaggagccattaaatgtgaaggtttagatgtcgaagacttacttagttactatgttgtttatgtcttttctaagcggtaaataataatatggtatgggttctgatatccccgttctaaatgcattaaataattccaatagagcgatttttgttcctataggaccttccaactgtggatactctgtattgttaatagatatattaatacttttgtcgggtaacagaggttctacgtcttctaaaaataaaagtttgataacatctggcctgttcataaataaaaacttggcgattctatatatactcttattatcaaatctagccattgtcttatagatgtgagctactgtaggtgtaccatttgattttctttctaatactatatatttctctcgaagaagttcttgcacatcatctgggaataaaatactactgttgagtaaatcagttattttttttatatcgatattgatggacatttttatagttaaggataataagtatcccaaagtcgataacgacgataacgaagtatttatacttttaggaaatcacaatgactttatcagatcaaaattaacaaaattaaaggagcatgtatttttttctgaatatattgtgactccagatacatatggatctttatgcgtcgaattaaatgggtctagttttcagcacggtggtagatatatagaggtggaggaatttatagatgctggaagacaagttagatggtgttctacatccaatcatatatctgaagatatacccgaagatatacacactgataaatttgtcatttatgatatatacacttttgacgctttcaagaataaacgattggtattcgtacaggtacctccgtcgttaggagatgatagctatttgactaatccgttattgtctccgtattatcgtaattcagtagccagacaaatggtcaatgatatgatttttaatcaagattcatttttaaaatatttattagaacatctgattagaagccactatagagtttctaaacatataacaatagttagatacaaggataccgaagaattaaatctaacgagaatatgttataatagagataagtttaaggcgtttgtattcgcttggtttaacggcgtttcggaaaatgaaaaggtactagatacgtataaaaaggtatctaatttgatataatgaattcagtgactgtatcacacgcgccatatactattacttatcacgatgattgggaaccagtaatgagtcaattggtagagttttataacgaagtagccagttggctgctacgagacgagacgtcgcctattcctgataagttctttatacagttgaaacaaccgcttagaaataaacgagtatgtgtgtgcggtatagatccgtatccgaaagatggaactggtgtaccgttcgaatcaccaaattttacaaaaaaatcaattaaggagatagcttcatctatatctagattaaccggagtaattgattataaaggttataaccttaatataatagacggggttataccctggaattattacttaagttgtaaattaggagaaacaaaaagtcacgcgatctactgggataagatttccaagttactgctgcagcatataactaaacacgttagtgttctttattgtttgggtaaaacagatttctcgaatatacgggcaaagttagaatccccggtaactaccatagtgggatatcatccagcggctagagaccgtcaattcgagaaagatcgatcatttgaaattatcaacgttttactggaattagacaacaaggtacctataaattgggctcaagggtttatttattaatgctttagtgaaattttaacttgtgttctaaatggatgcggctattagaggtaatgatgttatctttgttcttaagactataggtgtcccgtcagcgtgcagacaaaatgaagatccaagatttgtagaagcatttaaatgcgacgagttagaaagatatattgagaataatccagaatgtacactattcgaaagtcttagggatgaggaagcatactctatagtcagaattttcatggatgtagatttagacgcgtgtctagacgaaatagattatttaacggctattcaagattttattatcgaggtgtcaaactgtgtagctagattcgcgtttacagaatgcggcgccattcatgaaaatgtaataaaatccatgagatctaatttttcattgactaagtctacaaatagagataaaacaagttttcatattatctttttagacacgtataccactatggatacattgatagctatgaaacgaacactattagaattaagtagatcatctgaaaatccactaacaagatcgatagacactgccgtatataggagaaaaacaactcttcgggttgtaggtactaggaaaaatccaaattgcgacactattcatgtaatgcaaccacctcatgataatatagaagattacctattcacttacgtggatatgaacaacaatagttattacttttctctacaacgacgattggaggatttagttcctgataagttatgggaaccagggtttatttcattcgaagacgctataaaaagagtttcaaaaatattcattaattctataataaactttaatgatctcgatgaaaataattttacaacggtaccactggtcatagattacgtaacaccttgtgcattatgtaaaaaacgatcgcataaacatccgcatcaactatcgttggaaaatggtgctattagaatttacaaaactggtaatccacatagttgtaaagttaaaattgttccgttggatggtaataaactgtttaatattgcacaaagaattttagacactaactctgttttattaaccgaacgaggagaccatatagtttggattaataattcatggaaatttaacagcgaagaacccttgataacaaaactaattttgtcaataagacatcaactacctaaggaatattcaagcgaattactctgtccaagaaaacgaaagactgtagaagctaacatacgagacatgttagtagattcagtggagaccgatacctatccggataaacttccgtttaaaaatggtgtattggacctggtagacggaatgttttactctggagatgatgctaaaaaatatatgtgtactgtatcaaccggatttaaatttgacgatacaaagttcgtcgaagacagtccagaaatggaagagttaatgaatatcattaacgatatccaaccattaacggatgaaaataagaaaaatagagagctatatgaaaaaacattatctagttgtttatgcggtgctaccaaaggatgtttaacattcttttttggagaaactgcaactggaaagtcgacaaccaaacgtttgttaaagtctgctatcggtgacctgtttgttgagacgggtcaaacaattttaacagatgtattggataaaggacctaatccatttatcgctaacatgcatttgaaaagatctgtattctgtagcgaactacctgattttgcatgtagtgggtcaaagaaaatcagatctgataatattaaaaagttgacagaaccttgtgtcattggaagaccgtgtttctccaataaaattaataatagaaaccatgcgacaatcattatcgatactaattacaaacctgtttttgataggatagataacgcattaatgagaagaattgccgtcgtgcgattcagaacacacttttctcaaccttctggtagagaggctgctgaaaataatgacgcgtacgataaagtcaaactattagacgaggggttagatggtaaaatacaaaataatagatatagattcgcatttctatacttgttggtgaaatggtacagaaaatatcatgttcctattatgaaactatatcctacacccgaagagattcctgactttgcattctatctcaaaataggtactctgttggtatctagctctgtaaagcatattccattaatgacggacctctccaaaaagggatatatattgtacgataatgtggtcactcttccgttgactactttccaacagaaaatatccaagtattttaattctagactatttggacacgatatagagagcttcatcaatagacataagaaatttgccaatgttagtgatgaatatctgcaatatatattcatagaggatatttcatctccgtaaatatatgctcatatatttatagaagatatcacatatctaaatgaataccggaattatagatttatttgataatcatgttgatagtataccaactatattacctcatcagttagctactctagattatctagttagaactatcatagatgagaacagaagcgtgttattgttccatattatgggatcaggtaaaacaataatcgctttgttgttcgccttggtagcttccagatttaaaaaggtttacattctagtgccgaacatcaacatcttaaaaattttcaattataatatgggtgtagctatgaacttgtttaatgacgaattcatagctgagaatatctttattcattccacaacaagtttttattctcttaattataacgataacgtcattaattataacggattatctcgctacaataactctatttttatcgttgatgaggcacataatatctttgggaataatactggagaacttatgaccgtgataaaaaataaaaacaagattccttttctactattgtctggatctcccattactaacacacctaatactctgggtcatattatagatttaatgtccgaagagacgatagattttggtgaaattattagtcgtggtaagaaagtaattcagacacttcttaacgaacgcggtgtgaatgtacttaaggatttgcttaaaggaagaatatcatattacgaaatgcctgataaagatctaccaacgataagatatcacggacgtaagtttctagatactagagtagtatattgtcacatgtctaaacttcaagagagagattatatgattactagacgacagctatgttatcatgaaatgtttgataaaaatatgtataacgtgtcaatggcagtattgggacaacttaatctgatgaataatttagatactttatttcaggaacaggataaggaattgtacccaaatctgaaaataaataatggcgtgttatacggagaagaattggtaacgttaaacattagttccaaatttaaatactttattaatcggatacagacactcaacggaaaacattttatatacttttctaattctacatatggcggattggtaattaaatatatcatgctcagtaatggatattctgaatataatggttctcagggaactaatccacatatgataaacggcaaaccaaaaacatttgctatcgttactagtaaaatgaaatcgtctttagaggatctattagatgtgtataattctcctgaaaacgatgatggcagtcaattgatgtttttgttttcgtcaaacattatgtccgaatcctatactctgaaagaggtaaggcatatttggtttatgactatcccagatactttttctcaatacaaccaaattcttggacgatctattagaaaattctcttacgccgatatttctgaaccagttaatgtatatcttttagccgccgtatattccgatttcaatgacgaagtgacgtcattaaacgattacacacaggatgaattaattaatgttttaccatttgacatcaaaaagctgttgtatctaaaatttaagactaaagaaacgaatagaatatactctattcttcaagagatgtctgaaacgtattctcttccaccacatccatcaattgtaaaagttttattgggagaattggtcagacaatttttttataataattctcgtattaagtataacgataccaagttacttaaaatggttacatcagttataaaaaataaagaagacgctaggaattacatagatgatattgtaaacggtcacttctttgtatcgaataaagtatttgataaatctcttttatacaaatacgaaaacgatattattacagtaccgtttagactttcctacgaaccatttgtttggggagttaactttcgtaaagaatataacgtggtatcttctccataaaactgatgagatatataaagaaataaatgtcgagctttgttaccaatggataccttccagttacattggagccacacgagctgacgttagacataaaaactaatattaggaatgccgtatataagacgtatctccatagagaaattagtggtaaaatggccaagaaaatagaaattcgtgaagacgtggaattacctctcggcgaaatagttaataattctgtagttataaacgttccgtgtgtaataacctacgcgtattatcacgttggggatatagtcagaggaacattaaacatcgaagatgaatcaaatgtaactattcaatgtggagatttaatctgtaaactaagtagagattcgggtactgtatcatttagcgattcaaagtactgcttttttcgaaatggtaatgcgtatgacaatggcagcgaagtcactgccgttctaatggaggctcaacaaggtatcgaatctagttttgtttttctcgcgaatatcgttgactcataaaaaagagaatagcggtaagtataaacacgaatactatggcaataattgcgaatgttttattcccttcgatatatttttgataatatgaaaaacatgtctctctcaaatcggacaaccatctcataaaatagttctcgcgcgctggagaggtagttgctgctcgtataatctccccagaataatatacttgcgtgtcgtcgttcaatttatacggatttctatagttctctgttatataatgcggttttccatcatgattagacgacgacaatagtgttctaaatttagatagttgatcagaatgaatgtttattggcgttggaaaaattatccatacagcgtctgcagagtggttgatagttgttcctagatatgtaaaataatccaacttactaggcagcaaattgtctagataaaatactgaatcaaacggtgcagacgtattggtggatctaatggaatccaattgattaactatcttttgaaaatatacatttttatgatccgatacttgtaagaatatagaaataatgataagtccatcatcgtgtttttttgcctcttcataagaactatattttttcttattccaatgaacaagattaatctctccagagtatttgtacacatctatcaagtgattggatccataatcgtcttcctttccccaatatatacgtagtgatgataacacatattcattggggagaaaccctccacttatatatcctcctttaaaattaatccttactagttttccagtgttctggatagtggttggtttcgactcattataatgtatgtctaacggcttcaatcgcgcgttagaaattgcttttttagtttctatattaataggagatagttgttgcggcatagtaaaaatgaaatgataactgtttaaaaatagctcttagtatgggaattacaatggatgaggaagtgatatttgaaactcctagagaattaatatctattaaacgaataaaagatattccaagatcaaaagacacgcatgtgtttgctgcgtgtataacaagtgacggatatccgttaataggagctagaagaacttcattcgcattccaagcgatattatctcaacaaaattcagattctatctttagagtatccactaaactattacggtttatgtactacaatgaactaagagaaatctttagacggttgagaaaaggttctatcaacgatatcgatcctcactttgaagagttaatattattgggtggtaaactagataaaaaggaatctattaaagattgtttaagaagagaattaaaagaggaaagtgatgaacgtataacagtaaaagaatttggaaatgtaattctaaaacttacaacacgggataaattatttaataaagtatatataagttattgcatggcgtgttttattaatcaatcgttggaggatttatcgcatactagtatttacaatgtagaaattagaaagattaaatcattaaatgattgtattaacgacgataaatacgaatatctgtcttatatttataatatgctagttaatagtaaatgaacttttacagatctagtataattagtcagattattaagtataatagacgactagctaagtctattatttgcgaggatgactctcaaattattacactcacggcattcgttaaccaatgcctatggtgtcataaacgagtatccgtgtccgctattttattaactactgataacaaaatattagtatgtaacagacgagatagttttctctattctgaaataattagaactagaaacatgtctagaaagaaacgattatttctgaattattccaattatttgtccaaacaggaaagaagtatactatcgtcatttttttctctagatccagctactactgataatgatagaatagatgctatttatccgggtggcatacccaaaaggggtgagaatgttccagagtgtttatccagggaaattaaagaagaagttaatatagacaattcttttgtattcatagacactcggttttttattcatggcatcatagaagataccattattaataaattttttgaggtaatcttctttgtcggaagaatatctttaacgagtgatcaaatcattgatacatttaaaagtaatcatgaaatcaaggatctaatatttttagatccgaattcaggtaatggactccaatacgaaattgcaaaatatgctctagatactgcaaaactcaaatgttatggccatagaggatgttattacgaatcattaaaaaaattaactgaggatgattgattagaaaatataaattaatttaccatcgtgtatttttataacgggattgtccggcatatcatgtagatagttaccgtctacatcgtatactcgaccatctacgcctttaaatcctctatttattgacattaatctattagaattggaataccaaatattagtaccctcaattagtttattggtaatattttttttagacgatagatcgatggctcttgaaaccaaggttttccaaccggactcattgtcgatcggtgagaagtctttttcattagcatgaatccattctaatgatgtatgtttaaacactctaaacaattggacaaattcttttgatttgctttgaatgatttcaaataggtcttcgtctacagtaggcataccattagataatctagccattataaagtgcacgtttacatatctacgttctggaggagtaagaacgtgactattgagacgaatggctcttcctactatctgacgaagagacgcctcgttccatgtcatatctaaaatgaagatatcattaattgagaaaaaactaataccctcgcctccactagaagagaatacgcatgttttaatgcattctccgttagtgtttgattcttggttaaactcagccaccgccttgattctagtatcttttgttctagatgagaactctatattagagataccaaagactttgaaatatagtaataagatttctattcctgactgattaacaaatggttcaaagactagacatttaccatgggatgctaatattcccaaacatacatctataaatttgacgcttttctcttttaattcagtaaatagagagatatcagccgcactagcatcccctttcaatagttctccctttttaaaggtatctaatgcggatttagaaaactctctatctcttaatgaatttttaaaatcattatatagtgttgctatctcttgcgcgtattcgcccggatcacgattttgtctttcaggaaagctatcgaacgtaaacgtagtagccatacgtctcagaattctaaatgatgatatacctgtttttatttcagcgagtttagccttttgataaatttcttcttgctttttcgacatattaacgtatcgcattaatactgttttcttagcgaatgatgcagacccttctacgtcatcaaaaatagaaaactcgttattaactatgtacgaacataggcctcctagtttggagactaattctttctcatcaactagacgtttattctcaaatagcgattggtgttgtaaggatcctggtcgtagtaagttaaccaacatggtgaattcttgcacactattaacgataggtgtagccgataaacaaatcatcttatggttttttaatgcgatggtcttagataaaaaattatatactgaacgagtaggacggatcttaccatcttctttgattaatgatttagaaatgaagttatgacattcatcaataatgacgcatattctactcttggaattaatagttttgatattagtaaaaaatttatttctaaaattttgatcatcgtaattaataaaaatacaatccttcgttatctctggagcgtatctgagtatagtgttcatccaaggatcttctatcaaagcctttttcaccaataagataatagcccaattcgtataaatatccttaagatgtttgagaatatatacagtagtcattgttttaccaacacccgtttcatggaacaataaaagagaatgcatactgtctaatcctaagaaaactcttgctacaaaatgttgataatccttgaggcgtactacgtctgttcccatcatttcaacaggcatattagtagttctgcgcaatgcataatcgatataggccgcgtgtgatttactcatttatgagtgataagtaataactatgttttaaaaatcacagcagtagtttaactagtcttctctgatgtttgttttcgatactttttgaatcagaagtcatactagaataaagcaacgagtgaacgtaatagagagcttcgtatactctattcgaaaactctaagaacttattaatgaattccgtatccactggattgtttaaaatactaaattgaacactgttcacatccttccaagaagaagacttagtgacggacttaacatgagacataaataaatccaaattttttttacaaacatcactagccaccataatggcgctatctttcaaccagctatcgcttacgcattttagcagtctaacatttttaaagagactacaatatattctcatagtatcgattacacctctaccgaataaagttggaagtttaataatacaatatttttcgtttacaaaatcaaataatggtcgaaacacgtcgaaggttaacatcttataatcgctaatgtatagattgttttcagtgagatgattattagatttaatagcatctcgttcacgtttgaacagtttattgtgtgcgctgaggtcggcaactacggcgtccgctttagtactcctcccataatactttacgctattaatctttaaaatttcatagactttatctagatcgctttctggtaacatgatatcatgtgtaaaaagttttaacatgtcggtcggcattctatttagatcattaactctagaaatctgaagaaagtaattagctccgtattccagactaggtaatgggcttttacctaaagacaagttaagttctggcaatgtttcataaaatggaagaaggacatgcgttccctcccggatattttttacaatttcatccatttacaactctatagtttgttttcattattattagttattatctcccataatcttggtaatacttaccccttgatcgtaagataccttatacaggtcattacatacaactaccaattgtttttgtacataatagattggatggttgacatccatggtggaataaactactcgaacagatagtttatctttccccctagatacattggccgtaatagttgtcggcctaaagaatatctttggtgtaaagttaaaagttagggttcttgttccattattgctttttgtcagtagttcattataaattctcgagatgggtccgttctctgaatatagaacatcatttccaaatctaacttctagtctagaaataatatcggtcttattcttaaaatctattcccttgatgaagggatcgttaatgaacaaatccttggcctttgattcggctgatctattatctccgttatagacgttacgttgactagtccaaagacttacaggaatagatgtatcgatgatgttgatactatgtgatatgtgagcaaagattgttctcttagtggcatcactatatgttccagtaatggcggaaaactttttagaaatgttatatataaaagaattttttcgtgttccaaacattagcagattagtatgaagataaacactcatattatcaggaacattatcaatttttacatacacatcagcatcttgaatagaaacgataccatcttctggaacctcaacaatctcggcagactccggataaccagtcggtgggccatcactaacaataactagatcatccaacaatctactcacatatgcatctatataatctttttcatcttgtgagtaccctggatacgaaataaatttattatccgtatttccataataaggtttagtataaacagagagcgatgttgccgcatgaacttcagttacagtcgccgttggttggtttatttgacctattactctcctaggtttctctataaacgatggtttaatttgtacattcttaaccatatatccaataaagctcaattcaggaacataaacaaattctttgttgaacgtttcaaagtcgaacgaagagtcacgaataacgatatcggatactggattgaaggttaccgttacggtaatttttgaatcggatagtttaagactgctgaatgtatcttccacatcaaacggagttttaatataaacgtatactgtagatggttctttaatagtgtcattaggagttaggccaatagaaatatcattaagttcactagaatatccagagtgtttcaaagcaattgtattattgatacaattattatataattcttcgccctcaatttcccaaataacaccgttacacgaagagatagatacgtgattaatacatttatatccaacatatggtacgtaaccgaatcttcccatacctttaacttctggaagttccaaactcagaaccaaatgattaagcgcagtaatatactgatccctaatttcgaagctagcgatagcctgattgtctggaccatcgtttgtcataactccggatagagaaatatattgcggcatatataaagttggaatttgactatcgactgcgaagacattagaccgtttaatagagtcatccccaccgatcaaagaattaatgatagtattattcattttctatttaaaatggaaaaagcttacaataaactccgtagagaaatatctataatttgtgagttttccttaaagtaacagcttccgtaaacgccgtctttatctcttagtaagtttattgtatttataaccttttccttatcttcatagaatactaaaggcaacaaagaaatttttggttcttctctaagagctacgtgagacttaaccatagaagccaacgaatccctacatattttagaacagaaataccctacttcaccacccttgtatgtctcaatactaataggtctaaaaaccaaatcttgattacaaaaccaacacttatcaattacactatttgtcttaatagacacatctgccatagatttataatactttggtagtatacaagcgagtgcttcttctttagcgggcttaaagactgctttaggtgctgaaataaccacatctggaaggcttactcgcttagccatttaattacggaactatttttttatacttctaatgagcaagtagaaaacctctcatctacaaaaacatactcgtgtccataatcctctaccatagttacacgttttttagatctcatatgtgctaaaaagttttcccatactaattggttactattatttttcgtataatttttaacagtttgaggttttagatttttagttacagaagtgatatcgaatattttatccaaaaagaatgaataattaattgtcttagaaggagtgttttcttggcaaaagaataccaagtgcttaaatatttctactacttcattaatcttttctgtactcagattcagtttctcatcttttacttgattgattatttcaaagactaacttataatcctttttatttattctctcgttagccttaagaaaactagatacaaaatttgcatctacatcatccgtggatatttgatttttttccatgatatccaagagttccgagataatttctccagaacattgatgagacaataatctccgcaatacatttctcaaatgaataagtttattagacacgtggaagtttgactttttttgtacctttgtacatttttgaaataccgactcgcaaaaaatacaatattcatatccttgttcagatactataccgttgtgtctacaaccgctacataatcgtagattcatgttaacactctacgtatctcgtcgtccaatattttatataaaaacattttatttctagacgttgccagaaaatcctgtaatacttttagttttttgggctgtgaataaagtatcgccctaatatggttaccgtcctccgccaatatagtagttaaattatccgcacatgcaaaagaacaccgcttaggcggattcagtacaatgttatatttttcgtaccaactcatttaaatatcataatctaaaatagttctgtaatatgtctagcgctaatatattgatcataatcctgtgcataaattaagatacaacaatgtctcgaaatcatcgacatggcttcttccatagttagaagatcgtcgtcaaagttagcaacgtgattcatcaacatttgctgttttgaggcagcaaatactgaaccgtcgccattcaaccattcataaaaaccatcgtctgaatccattgataatttcttgtactggtttttgagagctcgcatcaatctagcatttctagctcccggattgaaaacagaaagaggatcgtacatccagggtccattttctgtaaatagaatcgtataatgtcccttcaagaagatatcagacgatccacaatcaaagaattggtctccgagtttgtaacaaacagcggactttaacctatacatgataccgtttagcatgatttctggtgatacgtcaatcggagtatcatctattagagatctaaagccggtgtaacattctccaccaaacatattcttattctgacgtcgttctacataaaacatcattgctccattaacgataacaggggaatgaacagcactacccatcacattagttcccaatggatcaatgtgtgtaactccagaacatcttccatatcctatgttaggaggagcgaacaccactcttccactattgccatcgaatgccatagaataaatatccttggaattgatagaaatcggactgtcggatgttgtgatcatcttcataggattaacaactatgtatggtgccgcctgaagtttcatatcgtaactgatgccgtttataggtctagccacagaaaccaacgtaggtctaaatccaactatagacaaaatagaagccaatatctgttcctcatctgtcataacttgagagcatccagtatgaataatcttcattagatggggatctaccgcatcatcatcgttacaataaaaaattcccattctaatgttcataattgcttttctaatcatggtatgcatgtttgctctctgaatctctgtggaaattagatctgatacacctgtaatcactatcggattatcctccgtaagacgattaaccaacaacatataattataagactttacttttctaaattcataaagttgctggattaggctataggtgtctccatgtacatacgcgttctcgagcgcaggaagtttaataccgaatagtgccatcagaataggatgaatatagtaattagtttctggttttctataaataaaagacaaatcttgtgaactagacatatcggtaaaatgcatggattggaatcgtgtagtcgacagaagaatatgatgattagatggagagtatattttatctaactctttgagttggtcaccgattctaggactagctcgagaatgaataagtactaaaggatgagtacatttcacagaaacactagcattgttcaatgtgctctttacatgggtaaggagttgaaatagctcgtttctatttgttctgacaatatttagtttattcataatgttaagcatatcctgaatagtaaagttagatgtgtcatacttgttagtagttagatatttagcaattgcattcccatcatttctcaatctcgtactccaatcatgtgtagatgctacttcatctatagaaaccatacaatcctttttgataggctgttgagattgattatttcctgcacgtttaggtttggtacgttgatttctagcccctgcggatataaagtcatcgtctacaatttgggacaatgaattgcatacactacaagacaaagatttatcagaagtgtgaatatgatcttcatctaccaaagaaagagtttgattagtataactagattttagtcctgcgttagatgttaaaaaaacatcgctattgaccacggcttccattatttatattcgtagtttttactcgaaagcgtgattttaatatccaatcttattacttttggaatcgttcaaaacctttgactaattgtagaatttgatctattgccctacgcgtatactcccttgcatcatatacgttcgtcaccagatcgtttgtttcggcctgaagttggtgcatatctctttcaacattcgacatgagatccttaagggccatatcgtctagattttgttgagatgctgctcctggatttggattttgttgtgctgttgtacatactgtaccaccagtaggtgtaggagtacatacagtggccacaataggaggttgagaaagtgtaaccgttggagtagtacaagaaatatttccatccgattgttgtgtacatgtagttgttggtaacgtctgagaaggttgggtagatggcggtgtcgtcgtcttttgatctttattaaatttagagataatatcctgaacagcattgctcggcgtcaacgctggaaggagtgaactcgccggcgcatcagtatcttcagacagccaatcaaaaagattagacatatcagatgatgtattagtttgttgtcgtggttttggtgtaggagcagtactactaggtagaagaataggagccggtgtagctgttggaaccggctgtggagttatatgaatagttggttgtagcggttggataggctgtctgctggcggccatcatattatctctagctagttgttctcgcaactgtctttgataatacgactcttgagactttagtcctatttcaatcgcttcatcctttttcgtatccggatccttttcttcagaataatagattgacgactttggtgtagaggattctgccagcccctgtgagaacttgttaaagaagtccatttaaggctttaaaattgaattgcgattataagattaaatggcagacacagacgatattatcgactatgaatccgatgatctcaccgaatacgaggatgatgaagaagaggaagaagatggagagtcactagaaactagtgatatagatcccaaatcttcttataagattgtagaatcagcatccactcatatagaagatgcgcattccaatcttaaacatatagggaatcatatatctgctcttaaacgacgctatactagacgtataagtctatttgaaatagcgggtataatagcagaaagctataacttgcttcaacgaggaagattacctctagtttcagaattttctgacgaaacgatgaagcaaaatatgctacatgtaattatacaagagatagaggagggttcttgtcctatagtcatcgaaaagaacggagaattgttgtcggtaaacgattttgacaaagatggtctaaaattccatctagactatattatcaaaatttggaaacttcaaaaacgatattagaatttatacgaatatcgttctctaaatgtcacaatcaagtctcgcatgttcagcaatttattgtcgtactttatatcgtgttcattaacgatatcttgcaaaatagtaatgattctatcttccttcgatagatattcttcagagattattgtcttatattctttcttgttatcagatatgaatttgataagactttgaacattattgatacccgtctgtttaattttttctacagatattttagttttggcagattctatcgtatctgtcaatagacatccaacatcgacattcgacgtcaattgtctataaatcaacgtataaattttagaaataacattagcgaattgttgtgcattgatgtcgttattctgaaacagtatgattttaggtagcattttcttaacaaagagaacgtatttattgttactcagttgaacagatgatatatccagattactaacgcatctgattccatataccaaactttcagaagaaatggtgtacaattgtttgtattcattcaatgtctctttttcagaaattagtttagagtcgaatactgcaataattttcaagagatagttttcatcagataagattttatttagtgtagatatgataaaactattgttttgttggagaacttgatacgccgcgttctctgtagtcgacgctctcaaatgggaaacaatctccattatttttttggaatcggatactatatcttcggtatcttgacgcagtctagtatacatagagttaagagagattagagtttgtacattaagcaacatgtctctaaatgtggctacaaacttttcctttttcacatcatctagtttattatataccgatttcacaacggcaccagatttaaggaaccagaatgaaaaactctgataactacaatatttcatcatagttacgattttatcatcttctatagttggtgtaatagcgcatacctttttctccaagactggaaccaacgtcataaaaatgtttaaatcaaaatccatatcaacatctgatgcgctaagaccagtctcgcgttcaagattatctttactaatggtgacgaactcatcgtataaaactctaagtttgtccattatttatttacagatttagttgtttaatttatttgtgctcttccagagttgggatagtatttttctaacgtcggtattatattattaggatctacgttcatatgtatcataatattaatcatccacgttttgataaatctatctttagcttctgaaataacgtatttaaacaaaggagaaaaatatttagctacggcatcagacgcaataacattttttgtaaatgtaacgtatttagacgacagatcttcgttaaaaagttttccatctatgtagaatccatcggttgttaacaccattcccgcgtcagattgaataggagtttgaatagtttgttttggaaatagatccttcaataacttatagttgggtgggaaaaaatcgattttatcactagactctttcttttttactatcattacctcatgaactatttcttgaatgagtatatgtattttctttcctatatcggacgcgttcattggaaaatataccatgtcgttaactataagaatatttttatcctcgtttacaaactgaataatatcagatgtagttcgtaaacgaactatatcatcaccagcacaacatctaactatatgatatccactagtttcctttagccgtttattatcttgttccatattagcagtcattccatcatttaagaaggcgtcaaagataatagggagaaatgacattttggattctgttacgactttaccaaaattaaggatatacggacttactatctttttctcaacgtcgatttgatgaacacacgatgaaaatgtgcttctatgagattgatcatgtagaaaacaacaagggatacaatatttccgcatatcatgaaatatattaagaaatcccaccttattatatttccccaaaggatccatgcacgtaaacattatgccgttatcattaataaagacttctttctcatcggatctgtaaaagttgttactgatttttttcattccaggatctagataattaataatgatgggttttctattcttattctttgtattttggcatatcctagaccagtaaacagtttccactttggtaaaatcagcagacttttgaacgctattaaacatggcattaatggcaataactaaaaatgtaaaatatttttctatgttaggaatatggtttttcactttaatagatatatggtttttggccaaaatgatagatatttttttatccgaggatagtaaaatattattagtcgccgtctctataaaaatgaagctagtctcgatatccaattttattctagaattgataggagtcgccaaatgtaccttatacgttatatctcccttgatgcgttccatttgtgtatctatatcggacacaagatctgtaaatagttttacgttattaatcatcacggtatcgccgtcgctagataacgctaatgtaccatccaagtcccaaatggagagatttaactgttcatcgtttagaataaaatgattaccggtcatattaataaagtgttcatcgtatctagataacaacgacttataattaatgtccaagtcttgaactcgctgaatgatcttttttaacccagttagttttagattggtacgaaatatattgttaaactttgattctacagtaatgtccaaatctagttgtggaaatacttccatcaacattgtttcaaacttgataatattattatctacatcttcgtacgatccaaattccggaatagatgtatcgcacgctctggccacccagataaccaaaaagtcacacgctccaggatatacattgtataaaaagctatcgttttttagtagggtttttttctgcgtgtatacgaagggattaaaaatagtattatcaacgtaactatattccaaattattcttatgagaatagataataatatcgtccttaatatctaacaaatttcctaaatatccctttaattgagtcattcgaagcgtcaatagaatatgtctcttaactatttccggctgttgtatatttaaatgacttcgtaaaaaataatatatgggcgacttctcatctatgtaatcatatggagtgagatatagggctcgttctacctcctgccccttacccacctgtaataccaattgcggacttactatatatcgcatatttatatcgtggggtaaagtgaaaatctactaccgatgatgtaagtcttacaatgttcgaaccagtaccagatcttaatttggaggcctccgtagaactaggggaggtaaatatagatcaaacaacacctatgataaaggagaatagcggttttatatcccgcagtagacgtctattcgcccatagatctaaggatgatgaaagaaaactagcactacgattctttttacaaagactttattttttagatcatagagagattcattatttgttcagatgcgttgacgctgtaaaagacgtcactattaccaaaaaaaataacattatcgtggcgccttatatagcacttttaactatcgcatcaaaaggatgcaaacttacagaaacaatgattgaagcattctttccagaactatataatgaacatagtaagaaatttaaattcaactctcaagtatccatcatccaagaaaaactcggataccagtttggaaactatcacgtttatgattttgaaccgtattactctacagtagctctggctattcgagatgaacattcatctggcatttttaatatccgtcaagagagttatctggtaagttcattatctgaaataacatatagattttatctaattaatctaaaatctgatcttgttcaatggagtgctagtacgggcgctgtaattaatcaaatggtaaatactgtattgattacagtgtatgaaaagttacaactggtcatagaaaatgattcacaatttacatgttcattggctgtggaatcaaaacttccaataaaattacttaaagatagaaatgaattatttacaaaattcattaacgagttaaaaaagaccagttcattcaagataagcaaacgcgataaggatacgctactaaaatattttacttaggactggagttagaatttatagacgactcatttcgtttatcattgttactattattactattactatcattattagtgttggcattattagtattcttcttgtcatcttgttcagaaatatacagcaatgctatacctaatactaaatacattatcatgctcgcaatggctctaacaacaacgaaccaaaatgaatttggtcgtagcttttgttcacaaaaatacataaagaaatgtctacataaatctatggcgccattggctacttgaaatagcgccagtcctcctacagattttaatatagctgtataacatgacatttattcatcatcaaaagagacagagtcaccatctgtcatatttagattttttttcatgtgttcaaagtatcctctactcatttcattataatagtttatcatacttagaattttaggacggatcaatgagtaagacttgactagatcgtcagtagtaatttgtgcatcgtctattctgcatccgcttcgtcgaataatgtatagcatcgctttgagattctccatagctatcaagtctttatacaatgacatggaaatatctgtgaatactttatacttctccaacatcgatgccttaacatcatcgcctactttagcattgaaaatacgttctattgtgtagatggatgtagcaagatttttaaacaacaatgccatcttacacgatgattgcctcaagtctccaatcgtttgtttagaacgattagctacagagtccaatgcttggctgactagcatattattatctttagaaattgtattcttcaatgaggcgtttatcatatctgtgatttcgttagtcatattacagtctgactgggttgtaatgttatccaacatatcacctatggatacggtacacgtaccagcatttgtaataatcctatctaagatgttgtatggcattgcgcagaaaatatcttctcctgtaatatttccactctcgataaatctactcagattattcttaaatgccttattctctggagaaaagatatcagtgtccatcatttcattaatagtatacgcagaaaagataccacgagtatcaattctatccaagatacttatcggttccgagtcacagataatggtttcctctccttcgggagatcctgcatagaaatatctaggacaatagtttctatactgtctgtaactctgataatctctaaagtcactaactgataccatgaaattgagaagatcaaacgctgaagtaattaatttttctgcctcgtttttactacaactagttttcatcaatgtagtgacgatgtattgtttagttacttttggtctaatactgatgatagagatattattacttcccataatggatcttctagtagtcaccttaaagcccattgatgcaaatagcagatagataaagtcttggtatgactcctttctaatatagtacggactacctttgtcacccaactttatacccacataagccataacaacctctttaatagccgtttcatgaggtttatcagccatgagcctgagtagttggaagaatctcatgaatcctgtctcagaaagtcctatatgcatgatagatttatctttcctgggaaactctcgtatagtcatagatgaaatactcttcaaagtttctgaaataagattagtaacagtcttacctccgactactctaggtaacaaacaaactctaataggtgttttctctgcggagataatatcagaaaggatagagcaataagtagtattattgtgattataaagaccgaatacataacaggtagaatttataaacatcatgtcctgaaggtttttagacttgtattcctcgtaatccataccgtcccaaaacatggatttggtaactttgatagccgtagatctttgttccttcgccaacaggttaaagaaattaataaagaatttgtggtttctacctatgtctacaaattgcacgtttggaagcgccacggttacattcactgcagcattttgaggatcgcgagtatgaagtacgatgttattgtttactggtatatctggaaagaattctaccagtctaggaataagagattgatatcgcatagaaatacaaaagttcataatctcatcatctaagagcattttgttaccattgtaataaatatccactctgtcatatgtataaatgaagtactgttcaaacatgatgagatgtttatatgttggcatagtagtgagatctacgtttggtaatggcaatgtattaagattaactccataatgtctagcagcatctgcgatgttataagcgttgtcaaagcggggtcgatcttgtgctgttatatattgtctaacacctataagattatcaaaatcttgtctgcttaatacaccgttaacaatttttgccttgaattcttttattggtgcattaataacatccttatagaggatgttaaacaaataagtgttatcaaagttaagatctggatatttcttttctgctagaacatccattgagtcggagccatctggtttaatataaccaccgataaatctagctctgtattctgtatccgtcaatctaatattaagaaggtgttgagtgaaaggtggaagatcgtaaaagctgtgagtattaatgataggattagtttccgaactaatgttaattggggtattaataatatctatatttccagcgttaagtgtaacattaaacagttttaattcacgtgacgtggtatcaattaaataattaatgcccaatttggatatagcagcctgaagctcatcttgtttagttacggatcctaatgagttattaagcaatatatcgaacggatgaacgaaggttgttttaagttggtcacatactttgtaatctagacatagatgcggaagaacggtagaaactatacgaaataaatattcagagtcctctaattgatcaagagtaactattgacttaataggcatcatttatttagtattaaatgacgaccgtaccagtgacggatatacaaaacgatttaattacagagttttcagaagataattatccatctaacaaaaattatgaaataactcttcgtcaaatgtctattctaactcacgttaacaacgtggtagatagagaacataatgccgccgtagtgtcatctccagaggaaatatcctcacaacttaatgaagatctatttccagatgatgattctccggccactattatcgaacgagtacaacctcatactactattattgacgatactccacctcctacgtttcgtagagagttattgatatcggaacaacgtcaacaacgagaaaaaagatttaatattacagtatcgaaaaatgctgaagcaataatggaatctagatctatgatatcttctatgccaacacaaacaccatccttgggagtagtttatgataaagataaaagaattcagatgttggaggatgaagtggttaatcttagaaatcaacgatctaatacaaaatcatctgataatttagataattttaccagaatactatttggtaagactccgtataaatcaacagaagttaataagcgtatagccatcgttaattatgcaaatttgaacgggtctcccttatcagtcgaggacttggatgtttgttcagaggatgaaatagatagaatctataaaacgattaaacaatatcacgaaagtagaaaacgaaaaattatcgtcactaacgtgattattattgtcataaatattatcgagcaagcattgctaaaactcggatttgaagaaatcaaaggactgagtaccgatatcacttcagaaattatcgatgtggagatcggagatgactgcgatgctgtagcatcaaaactaggaatcggtaacagtccggttcttaatattgtattgtttatactcaagatattcgttaaacgaattaaaattatttaatttaatacattcccatatccagacaacaatcgtctggattaatctgttcctgtcgtctcataccggacgacatattaatctttttattagtaggcatctttttagatggtttctttttcccagcattaactgagtcgatacctagaagatcgtgattgatctctccgaccattccacgaacttctaattggccgtctctgacggtaccataaactattttaccagcattagtaacagcttggacaatctgaccatccatcgcattgtacgatgtagtagtaactgttgttctacgtctaggagcaccagaagtatttttggagcccttggatgttgatgtagaagaagacgaggattttgattttggtttacatgtaatacattttgtatcacatgcgccggcagtcacatctgtttgagaattaagattattgttgcctcctttgacggctgcatctccaccgatttgcgctagtagatttttaagctgtggtgtaatcttattaactgtttcgatataatcatcgtaactgcttctaacggctaaattttttttatccgccatttagaagctaaaaatatttttatttatgcagaagatttaactagattatacaatgaactaatatgatccttttccagattatttacaaacttggtattttttggttctggaggaggcgaatttaaattcggacttggatttggattttgtgggttcttgatcttattatacagcgcatataggatggcgacggtaactgctacgcaaataccgatcaacaaaagaataccaatcatttattgacaataacttcactattgatcaagtatgcaatatatcatcttttcactaaataagtagtaataatgattcaacaatgtcgagatatatggacgataataatttagttcatggaaatatcgctatgattggtatgaatgactccgctaactctgtggggcgcgcagtgctttccccacatagaataaattagcattccgactgtgataataataccaagtataaacgccataatactcaatactttccatgtacgagtgggactggtagacttactaaagtcaataaaggcgaagatacacgaaagaatcaaaagaatgattccagcgattagcacgccggaaaaataatttccaatcataagcatcatatccatttaactaataaaaattttaaatcgccgaatgaacaaagtggaatataaaccatataaaaacaatagtttgtactgcaaaaataatatctatttttgttttcgaagatatggtaaaattaaatagtagtacacagcatgttataactaacagcagcaacggctcgtaattacttatcatttactagacgaaaaggtggtgggatattttcttgctcaaataatacgaatatatcacccatccattttatgcgatgtttatatactctaatctttaatagatctatagacgacgggtttaccaacaatatagattttatcgattcatctaatttaaacccttccttaaacgtgaatgatctattatctggcataacgatgactctacccgatgaatcggacaatgtactgggccatgtagaataaattatcaacgaattatcgtctacgaacatttatatcatttgttttaattttagtacgcgaataaatagatataaaatagaaaataacagatattacaaccaatgttatggccgcgcccaaccaggtaggcagttttattttatcttttactacaggttctcctggatgtacgtcaccaacggcggacgtagttctagtacaattagacgtaagttccgcttgggaattttttaacgctaaagagttaacgttaatcgtgcacccaacgtatttacatctagttctttgaacatcttgattataatataaccattttctatctctagattcgtcggtgcactcatgtaaccaacataccctaggtcctaaatatttatctccggaattagattttggataattcgcgcaccaacaatttctatttcctttatgatcgttacaaaagacgtataatgccgtatccccaaaagtaaaataatcaggacgaataattctaataaactcagaacaatatctcgcatccatatgtttggagcaaatatcggaataagtagacatagccggtttccgttttgcacgtaaccattctaaacaattggggtttccaggatcgtttctacaaaatccagtcatgaaatcatcacaatgttctgtcttgtaattattattaaatatttttggacagtgtttggtatttgtcttagaacaacattttgccacgctatcactatcgcccaggagataatccttttttataaaatgacatcgttgcccggatgctatataatcagtggcgtgttttaaatccttaatatattcaggagttacctcgttctgataatagattaatgatccaggacgaaatttgaaagaactacatggttctccatgaattaatacatattgtttagcaaattcaggaactataaaactactacaatgatctatcgacataccatctatcaaacaaaacttgggtttaatttctcccggagatgtttcataatagtacgtataactttcttctgcaaacttaacagctctattatattcaggataattaaaacctaattccatatatttgtctcgtatatctgctattcctggtgctattttaattctattaagagtaacggctgcccccattcttaataatcgtcagtatttaaactgttaaatgttggtatatcaacatctaccttatttcccgcagtataaggtttgttgcaggtatactgttcaggaatggttacatttatacttcttctatagtcctgtctttcgatgttcatcacatatgcaaagaacagaataaacaaaataatgtaagaaataatattaaatatctgtgaattcgtaaatacattgattgccataataattacagcagctacaatacatacaatagacattcccacagtgttgccattacctccacgatacatttgagttactaagcaataggtaataactaagctagtaagaggcaatagaaaagatgagataaatatcatcaatatagagattagaggagggctatatagagccaagacgaacaaaatcaaaccgagtaacgttctaacatcattatttttgaagattcccaaataatcattcattcctccataatcgttttgcattatacctccatctttaggcataaacgattgctgctgttcctctgtaaataaatctttatcaagcactccagcacccgcagagaagtcgtcaagcatattgtaatatcttaaataactcatttatatattaaaaaatgtcactattaaagatggagtataatctttatgccgaactaaaaaaaatgacttgtggtcaacccctaagtctttttaacgaagacggggatttcgtagaagttgaaccgggatcatcctttaagtttctgatacctaagggattttacgcctctccttccgtaaagacgagtctagtattcgagacattaacaacgaccgataataaaatcactagtatcaatccaacaaatgcgccaaagttatatcctcttcaacgcaaagtcgtatctgaagtagtttctaatatgaggaaaatgatcgaatcaaaacgtcctctatacattactcttcacttggcgtgtggatttggtaagactattaccacgtgttatcttatggctacacacggtagaaaaaccgtcatttgcgtacccaataaaatgttaatacatcaatggaagacacaggtagaggcagtcggattggaacataagatatctatagatggagtaagtagtctattaaaggaactaaagactcaaagtccggatgtattaatagtagtcagtagacatctgacaaacgatgccttttgtaaatatatcaataagcattatgatttgttcatcttggatgaatcacatacgtataatctgatgaacaatacagcagttacaagatttttagcgtattatcctccgatgatgtgttattttttaactgctacacctagaccagctaaccgaatttattgtaacagtattattaatattgccaagttatccgatctaaaaaaaactatctatgcggtagatagtttttttgagccatattccacagacaatattagacatatggtaaaacgactagatggaccatctaataaatatcatatatatactgagaagttattatctgtagacgagcctagaaatcaacttattcttgataccctggtagaagaattcaagtcaggaactattaatcgaattttagttattactaaactacgtgaacatatggtattcttctacaaacgattattagattttttcggatcagaggttgtatttataggagacgcccaaaatagacgtactccagatatggtcaaatcaatcaaggaactaaatagatttatattcgtatccaccttattttattccggtactggtttagatattcctagtttggattcgttgttcatttgctcggcagtaatcaacaatatgcaaatagagcaattactagggagggtatgtcgagaaacagaactattagataggacggtatatgtatttcctaacacatccatcaaagaaataaagtacatgataggaaatttcatgcaacgaattattagtctgtctgtagataaactaggatttaaacaaaaaagttatcggaaacatcaagaatccgatcccacttctgtatgtacaacatcctccagagaagaacgtgtattaaatagaatatttaactcgcaaaatcgttaagaagtttaagcgacgatccgcatgctgcgcaggccagtgtattacccctcatagtattaatataatccaatgatacttttgtgatgtcggaaatcttaaccaatttagactgacaggcagaacacgtcatgcaatcatcatcgtcatcgataactgtagtcttgggcttctttttgcggctcttcattccggaacgcacattggtgctatccatttaggtagtaaaaaataagtcagaatatgccctatagcacgatcgtgcaaaacctggtatatcgtctctatctttatcacaatatagtgtatcgacatttttattattattgacctcgtttatcttggaacatggaatgggaacatttttgttatcaacggccatctttgccttaattccagatgttgtaaaattataactaaacagtctatcatcgacacaaatgaaattcttgtttagacgtttgtagtttacgtatgcggctcgttcgcgtctcattttttcagatattgcaggtactataatattaaaaataagaatgaaataacataggattaaaaataaagttatcatgacttctagcgctgatttaactaacttaaaagaattacttagtctgtacaaaagtttgaaattttcagattctgcggctatagaaaagtataattctttggtagaatggggaacatctacttactggaaaataggcgtgcaaaaggtagctaatgtcgagacgtcaatatctgattattatgatgaggtaaaaaataaaccgtttaatattgatccgggatattacattttcttaccggtatattttggaagcgtctttatttattcgaagggtaaaaatatggtagaacttggatctggaaactcttttcaaataccagatgatatgcgaagtgcgtgtaacaaagtattagacagcgataacggaatagactttctgagatttgttttgttaaacaatagatggataatggaagatgctatatcaaaatatcagtctccagttaatatatttaaactagctagtgagtacggattaaacatacccaaatatttagaaattgaaatagaggaagacacattatttgacgacgagttatactctattatagaacgctctttcgatgataaatttccaaaaatatccatatcgtatattaagttgggagaacttagacggcaagttgtagactttttcaaattctcgttcatgtatattgagtccatcaaggtagatcgtataggagataatatttttattcctagcgttataacaaaatcaggaaaaaagatattagtaaaagatgtagaccatttaatacgatccaaggttagagaacatacatttgtaaaagtaaaaaagaaaaacacattttccattttatacgactatgatggaaacggaacagaaactagaggagaagtaataaaacgaattatagacactataggacgagactattatgttaacggaaagtatttctctaaggttggtagtgcaggcttaaagcaattgactaataaattagatattaatgagtgcgcaactgtcgatgagttagttgatgagattaataaatccggaactgtaaaacgaaaaataaaaaaccaatcagcatttgatttaagcagagaatgtttgggatatccagaagcggattttataacgttagttaataacatgcggttcaaaatagaaaattgtaaggttgtaaatttcaatattgaaaatactaattgtttaaataacccgagtattgaaactatatatggaaactttaaccagttcgtctcaatctttaatatcgtcaccgatgtcaaaaaaagattattcgagtgaaataatatgcgcctttgatataggtgcaaaaaatcctgccagaactgttttagaagtcaaggataactccgttagggtattggatatatcaaaattagactggagttctgattgggaaaggcgcatagctaaagatttgtcacaatatgaatacactacagttcttctagaacgtcagcctagaaggtcgccgtacgtcaaatttatctattttattaaaggctttttatatcatacatcggctgccaaagttatttgcgtctcgcctgtcatgtctggtaattcatatagagatcgaaaaaagagatcggtcgaagcatttcttgattggatggacacattcggattgcgagactccgttccggatagacgcaaattagacgatgtagcggatagtttcaatttggctatgagatacgtattagataaatggaatactaattatacaccttataataggtgtaaatctagaaattacataaaaaaaatgtaataacgttagtaacgccattatggataatctatttacctttctacatgaaatagaagatagatatgccagaactatttttaactttcatctaataagttgcgatgaaataggagatatatatggtcttatgaaagaacgcatttcctcagaggatatgtttgataatatagtgtataataaagatatacatcatgccattaagaaactagtgtattgcgacatccaacttactaaacacattattaatcagaatacgtatccggtatttaacgattcttcacaagtgaaatgttgtcattatttcgacataaactcagataatagcaatattagctctcgtacagtagagatatttgagagggaaaagtcatctcttgtatcatatattaaaactaccaataagaagagaaaggtcaattacggcgaaataaagaaaactgttcatggaggcactaatgcaaattacttttccggtaaaaagtctgacgagtatctgagtactacagttagatccaacattaatcaaccttggatcaaaaccatctctaagaggatgagagttgatatcattaatcactctatagtaacgcgtggaaaaagctctatattacaaactatagaaattatttttactaatagaacatgtgtgaaaatattcaaggattctactatgcacattattctatccaaggacaaggatgaaaaggggtgtatacacatgattgacaaattattctatgtctattataatttatttctgttgttcgaggatatcatccaaaacgagtactttaaagaagtagctaatgttgtaaaccacgtacttacggctacggcattagatgagaaattattcctaattaagaaaatggctgaacacgatgtttatggagttagcaatttcaaaatagggatgtttaacctgacatttattaagtcgttggatcataccgttttcccctctctgttagatgaggatagcaaaataaagttttttaaggggaaaaagctcaatattgtagcattacgatctctggaggattgtataaattacgtgactaaatccgagaatatgatagaaatgatgaaggaaagatcgactattttaaatagcatagatatagaaacggaatcggtagatcgtctaaaagaattgcttctaaaatgaaaaaaaacactgattcagaaatggatcaacgactcggatataagtttttggtgcctgatcctaaagccggagttttttatagaccgttacatttccaatatgtatcgtattctaattttatattgcatcgattgcatgaaatcttgaccgtcaagcggccactcttatcgtttaagaataatacagaacgaattatgatagaaattagcaatgttaaagtgactcctccagattactcacctataatcgcgagtattaaaggtaagagttatgacgcattagccacgttcactgtaaatatctttaaagaggtaatgaccaaagagggtatatccatcactaaaataagtagttatgagggaaaagattctcatttgataaaaattccgctactaataggatacgggaataaaaatccacttgatacagccaagtatcttgttcctaatgtcataggtggagtctttatcaataaacaatctgtcgaaaaagtaggaattaatctagtagaaaagattacaacatggccaaaatttagggttgttaagccaaactcattcactttctcgttttcctccgtatcccctcctaatgtattaccgacaagatatcgccattacaagatatctctggatatatcacaattggaagcgtcgaatatatcatcgacaaagacatttataacggtcaatattgttttgctgtctcaatatttatctagagtgagtctagaattcattagacgtagcttatcatacgatatgcctccagaagttgtctatctagtaaacgcgataatagatagtgctaaacgaattactgaatctattactgactttaatattgatacatacattaatgacctggtggaagctgaacacattaaacaaaaatctcagttaacgatcaacgagttcaaatatgaaatgctgcataactttttacctcatatgaactatacacccgatcaactaaagggattttatatgatatctttactaagaaagtttctctactgtatctaccacacttctagatatccagatagagattcgatggtttgtcatcgtatactaacatacggcaaatattttgagacgttggcacatgatgaattagagaattacataggcaacatccgaaacgatatcatgaacaatcacaagaacagaggcacttacgcggtaaacattcatgtactaacaactcctggacttaatcatgcattttctagtctattgagtggaaagttcaaaaagtcagacggtagttatcgaacacatcctcactattcatggatgcagaatatttctattcctaggagtgttggattttatccggatcaagtaaagatttcaaagatgttttctgtcagaaaataccatccaagtcaatatctttacttttgttcatcggacgttccggaaagaggtcctcaggtaggtttagtatctcaattgtctgtcttgagttccattacaaatatactaacgtctgagtatttggatttggaaaagaaaatttgtgagtatatcagatcatattataaagatgatataagttactttgaaacaggatttccaatcactatagaaaatgctctagtcgcatctcttaatccaaatatgatatgtgattttgtaactgactttagacgtagaaaacggatgggattcttcggtaacttggaggtaggtattactttagttagggatcacatgaatgaaattcgcattaatattggagcgggaagattagtcagaccattcttggttgtggataacggagagctcatgatggatgtgtgtccggagttagaaagcagattagacgacatgacattctctgacattcagaaagagtttccgcatgtcatcgaaatggtagatatagaacaatttacttttagtaacgtatgtgaatcggttcaaaaatttagaatgatgtcaaaggatgaaagaaagcaatacgatttatgtgactttcctgccgaatttagagatggatatgtagcatcttcactagtgggaatcaatcacaattctggacccagagctattcttggatgtgctcaagctaaacaagctatctcttgtctgagctcggatatacgaaataaaatagacaatggaattcatttgatgtatccagagaggccaatcgtgattagtaaggctttagaaacttcaaagattgcggctaattgcttcggccaacatgttactatagcattaatgtcgtacaaaggtatcaatcaagaggatggaattatcatcaaaaaacaatttattcagagaggcggtctcgatattgttacagccaagaaacatcaagtagaaattccgttggaaaactttaataacaaagaaagagataggtctaacgcctattcaaaattagaaagtaatggattagttagactgaatgctttcttggaatccggagacgctatagcacgaaatatctcatcaagaactcttgaagatgattttgctagagataatcagattagctttgatgtttccgaaaaatataccgatatgtacaaatctcgcgttgaacgagtacaagtagaacttactgacaaagttaaggtacgagtattaaccatgaaagaaagaagacccattctaggagacaaatttaccactagaacgagtcaaaagggaacagtcgcgtatatcgcggatgaaacggaacttccatacgatgaaaatggtatcacaccagatgtcattattaattctacatccatcttctctagaaaaactatatctatgttgatagaggttattttaacagccgcatattctgctaagccgtacaacaataagggagaaaaccgacctgtctgttttcctagtagtaacgaaacatccatcgatacatatatgcaattcgctaaacaatgttatgagcattcaaatccgaaattgtctgatgaagaattatcggataaaatcttttgtgaaaagattctctatgatcctgaaacggataagccttatgcatccaaagtattttttggaccaatttattacttgcgtctgaggcatttaactcaggacaaggcaaccgttagatgtagaggtaaaaagacgaagctcattagacaggcgaatgagggacgaaaacgtggaggaggtatcaagttcggagaaatggagagagactgtttaatagcgcatggtgcagccaatactattacagaagttttgaaagattcggaagaagattatcaagatgtgtatgtttgtgaaaattgtggagacatagcagcacaaatcaagggtattaatacatgtcttagatgttcaaaacttaatctctctcctctcttaacaaaaattgataccacgcacgtatctaaagtatttcttactcaaatgaacgccagaggcgtaaaagttaaattagatttcgaacgaaggcctccttcgttttataaaccattagataaagttgatctcaaaccgtcttttctggtgtaatattctagtttggtagtagatacatatcaatatcatcaaattcgagatccgaattataaaatgggcgtggattgttaactatagaatcggacgtctgatattcgaaaatctgtggagttttaggttttggtggaggtgtaactgctacttgggatactgaagtctgatattcagaaagctgggggatgttctggttcgacatccaccgatggtgtcacatcactaatcggttcggtaacgtctgtggacgatggaggcaccacttctacaggttctggttctttatcctcagtcatcaacggagctacttcaatgcgaggaaatgtataatttggtaatggtttctcatgtggatctgaagaagaggtaagatatctactagaaagataccgatcacgttctagttctcttttgtagaacttaactttttctttctccgcatctagttgatattccaacctcttcacgttactacgttcagattccaattcacgttcgcatgggttacctccgcagtttttacgagcgatttcacgttcagccttcatgcgtcttatagcatgaattcgcttatcgttatcgggtttagcttctgtcaccttagcaattccttttttattaaactctacataatcatatccatttctattgtttgttctaatataaacgagtatagcatcattgctaaatttttcaatagtatcgaaaacagaatatcctaaaccatataatatatattcaggaacactcaaactaaatgtccaggattctcctaaatacgtaaactttaatagtgcgaaatcattcaaaaatctaccacttatagatagatagatagtacataaatgcgtatagtagtctacctatctctttattatgaaaaccggcattacgatcatatatgtcgtgatatacctgtgatccgtttacgttaaaccataaatacatgggtgatcctataaacatgaatttatttctaattctcagagctatagttaattgaccgtgtaatatttgcttacatgcatacttgatacgatcattaataagatttttatcattgctcgttatttcagaatcgtatatataaggagtaccatcgtgattcttaccagatattatacaaaatactatatataaaatatattgacccacgttagtaatcatgtaaatgtttaacgttttaaattttgtattcaatgatccattatcatacgctagcatggtcttatgatattcattctttaaaatataatattgtgttagccattgcattggggctcctaatggagattttttattctcatccattttaggataggctttcataaagtccctaataacttcgtgaataatgtttctatgttttctactgatgcatgtatttgcttcgatttttttatcccatgtttcatctatcatagatttaaacgcagtaatgctcgcaacattaacatcttgaaccgttggtacaattccgttccataaatttataatgttcgccatttatataactcattttttgaatatacttttaattaacaaaagagttaagttactcatatggacgccgtccagtctgaacatcaatctttttagccagagatatcatagccgctcttagagtttcagcgtgattttccaacctaaatagaacttcatcgttgcgtttacaacacttttctatttgttcaaactttgttgttacattagtaatctttttttccaaattagttagccgttgtttgagagtttcctcattgtcgtcttcatcggctttaacaattgcttcgcgtttagcctctggctttttagcagccgttgtagaaaaaaattcagttgctggaattgcaagatcgtcatctccggggaaaagagttccgtccatttaaagtacagattttagaaactgacactctgcgttatttatatttggtacaacacatggattataaatattgatgttaataacatcagaaaatgtaaagtctatacattgttgcatcgtgttaaattttctaatggatctagtattattgggtccaacttctgcctgaaatccaaatatggaagcggatacaaaaccgtttcctggataaaccacacatctccacttttgctttacatcagaaattgtgtcgttgacatcttgaactctcctatctaatgccggtgttccacctatagattttgaatattcgaatgctgcatgagtagcattaaattccttaatattgccataattttcatatattgagtaaccctggataaaaagtaaacacaccgcagccgtagctaccacaataaaaaaaattgatagagagttcatttataatctattagaagctgacaaaatttttttacacgcatcagacaatgctttaataaatagttcaacatctacttttgtcatatcgaaccgatggtatgattctaacctagaattacatccgaaaaagttgactatgttcatagtcattaagtcattaacaaacaacattccagactctggattataagacgatactgtttcgtcacaattacctaccttaatcatgtgattatgaatattggctattagagcaccttctaagaaatctataatatctttgaaacacgatttaaaatcaaaccacgaatatacttctacgaagaaagttagtttacccataggagaaataactataaatggagatctaaatacaaaatccggatctatgatagttttaacattattatattctctattaaatacctccacatctaaaaatgttaattttgaaactatgtcttcgtttattaccgtacctgaactaaacgctataagctctattgtttgagaactctttaaacgatattcttgaaatacatgtaacaaagtttcctttaactcggtcggtttatctaccatagttacagaatttgtatccttatctataatataataatcaaaatcgtataaagttatataattatcgcgttcagattgggatcttttcaaatagactaaaaaccccatttctctagtaagtatcttatgtatatgtttgtaaaatatcttcatggtgggaatatgctctaccgcagttagccattcctcattgacagcggtagatgtattagacaaaactattccaatgtttaacaagggccattttacgagattattaaatccttgtttgataaatgtagccaatgagggttcgagttcaacgacgattgaattctcttcccgcggatgctgcatgatgaacgacgggatgttgttcgattgatttggaattctttttcgactttttgtttatattaaatattttaaaatttatagcggatagcaattcatgtaccacggataatgtagacgcgtattgcgcatcgatatctttattattagataaatttatcaataaatgtgagaagtttgcctcgttaaggtcttccatttaaatattatataaacatttgtgtttgtatcttattcgtcttttatggaatagttttttactagtaaagctgcaattacacactttgtccgtaaaacataaatataaacaccagcttttatcaatcgttccaaaaagtcgacggcggacatttttaacatggcatctattttaaatacacttaggtttttggaaaaaacatcattttataattgtaacgattcaataactaaagaaaagattaagattaaacataagggaatgtcatttgtattttataagccaaagcattctaccgttgttaaatacttgtctggaggaggtatatatcatgatgatttggttgtattggggaaggtaacaattaataatctaaagatgatgctattttacatggatttatcatatcatggagtgacaagtagtggagcaatttacaaattgggatcgtctatcgatagactttctctaaataggactattgttacaaaagttaataattatgatgatacattttttgacgacgatgattgatcgctattgcacaattttgtttttttactttctaatatagcgtttagattctttttcatgtgcgaatattgatttactaaaatatcgatgtttaacttttgttctatgacgtccttatcagcggtatcggtacatatacgtaattcaccttcacaaaatacggagtcttcgataataatagccaatcgattattggatctagctgtctgtatcatattcaacatgtttaatatatcctttcgtttcccctttacaggcatcgatcgtagcatattttccgcgtctgagatggaaatgttaaaactacaaaaatgcgtaatgttagcccgtcctaatattggtacgtgtctataagtttggcatagtagaataatagacgtgtttaaatgccttccaaagtttaagaattctattagagtattgcattttgatagtttatcacctacatcatcaaaaataagtaaaaagtgtgctgattttttatgattttgtgcgacagcaatacatttttctatgttacttttagttcgtatcagattatattctagagattcctgactactaacgaaattaatatgatttggccaaatgtatccatcataatctgggttataaacgggtgtaaacaagaatatatgtttatattttttaactagtgtagaaaacagagatagtaaatagatagtttttccagatccagatcctcccgttaaaaccattctaaacggcatttttaataaattttctcttgaaaattgtttttcttggaaacaattcataattatatttacagttactaaattaatttgataataaatcaaaatatggaaaactaaggtcgttagtagggaggagaacaaagaaggcacatcgtgacataaataacatttattatcatgatgacaccagaaaacgacgaagagcagacatctgtgttctccgctactgtttacggagacaaaattcaaggaaagaataaacgcaaacgcgtgattggtctatgtattagaatatctatggttatttcactactatctatgattaccatgtccgcgtttctcatagtgcgcctaaatcaatgcatgtctgctaacgaggctgctattactgacgccgctgttgccgttgctgctgcatcatctactcatagaaaggttgcgtctagcactacacaatatgatcacaaagaaagctgtaatggtttatattaccagggttcttgttatatattacattcagactaccagttattctcggatgctaaagcaaattgcactgcggaatcatcaacactacccaataaatccgatgtcttgattacctggctcattgattatgttgaggatacatggggatctgatggtaatccaattacaaaaactacatccgattatcaagattctgatgtatcacaagaagttagaaagtatttttgtgttaaaacaatgaactaatatttatttttgtacattaataaatgaaatcgcttaatagacaaactgtaagtaggtttaagaagttgtcggtgccggccgctataatgatgatactctcaaccattattagtggcataggaacatttctgcattacaaagaagaactgatgcctagtgcttgcgccaatggatggatacaatacgataaacattgttatttagatactaacattaaaatgtctacagataatgcggtttatcagtgtcgtaaattacgagccagattgcctagaccggatactagacatctgagagtattgtttagtattttttataaagattattgggtaagtttaaaaaagaccaatgataaatggttagatattaataatgataaagatatagatattagtaaattaacaaattttaaacaactaaacagtacgacggatgctgaagcgtgttatatatacaagtctggaaaactggttaaaacagtatgtaaaagtactcaatctgtactatgtgttaaaaaattctacaagtgacaacaaaaaatgaattaataataagtcgttaacgtacgccgccatggacgccgcgtttgttattactccaatgggtgtgttgactataacagatacattgtatgatgatctcgatatctcaatcatggactttataggaccatacattataggtaacataaaaactgtccaaatagatgtacgggatataaaatattccgacatgcaaaaatgctactttagctataagggtaaaatagttcctcaggattctaatgatttggctagattcaacatttatagcatttgtgccgcatacagatcaaaaaataccatcatcatagcatgcgactatgatatcatgttagatatagaagataaacatcagccattttatctattcccatctattgatgtttttaacgctacaatcatagaagcgtataacctgtatacagctggagattatcatctaatcatcaatccttcagataatctgaaaatgaaattgttgtttaattcttcattctgcatatcagacggcaatggatggatcataattgatgggaaatgcaatagtaattttttatcataaaagttgtaaagtaaataataaaacaataaatattgaactagtagtacgtatattgagcaatcagaaatgatgctggtacctcttatcacggtgaccgtagttgcgggaacaatattagtatgttatatattatatatttgtaggaaaaagatacgtactgtctataatgacaataaaattatcatgacaaaattaaaaaagataaagagttctaattccagcaaatctagtaaatcaactgatagcgaatcagactgggaggatcactgtagtgctatggaacaaaacaatgacgtagataatatttctaggaatgagatattggacgatgatagcttcgctggtagtttaatatgggataacgaatccaatgtcatggcgcctagcacagaacacatttacgatagtgttgctggaagcacgctgctaataaataatgatcgtaatgaacagactatttatcagaacactacagtagtaattaatgagacggagactgttgaagtacttaatgaagataccaaacagaatcctaactattcatccaatcctttcgtaaattataataaaaccagtatttgtagcaagtcaaatccgttcattacagaactcaacaataaatttagtgagaataatccgtttagacgagcacatagcgatgattatcttaataagcaagaacaagatcatgaacacgatgatatagaatcatcggtcgtatcattggtgtgattagtttcctttttataaaattgaagtaatatttagtattattgctgccgtcacgttgtacaaatggagatattccctgtattcggcatttctaaaattagcaattttattgctaataatgactgtagatattatatagatacagaacatcaaaaaattatatctgatgagatcaatagacagatggatgaaacggtacttcttaccaacatcttaagcgtagaagttgtaaatgacaatgagatgtaccatcttattccccatagactatcgactattatactctgtattagttctgtcggaggatgtgttatctctatagataatgacatcaatgacaaaaatattctaacatttcccattgatcatgctgtaatcatatccccactgagtaaatgtgtcgtagttagcaagggtcctacaaccatattggttgttaaagcggatatacccagcaaacgattggtaacatcgtttacaaacgacatactgtatgtaaacaatctgtcactgattaattatttgccgttgtctgtattcattattagacgagtcaccgactatttggatagacacatatgcgatcagatatttgcgaataataagtggtattccattataaccatcgacgataagcaatatcctattccatcaaactgtataggtatgtcctctgccaagtacataaattctagcatcgagcaagatactttaatacatgtttgtaacctcgagcatccattcgacttagtatacaaaaaaatgcagtcgtacaattctgtacctatcaaggaacaaatattgtacggtagaattgataatataaatatgagcattagtatttctgtggattaatagatttctagtatggggatcattaatcatctctaatctctaaatacctcataaaacgaaaaaaaagctattatcaaatactgtacggaatggattcattctcttctctttttatgaaactctgttgtatatctactgataaaactggaagcaaaaaatctgataaaaagaataagaataagatcaaggattatatggaacacgattattataaaataacaatagttcctggttcctcttccacgtctactagctcgtggtattatacacatgcctagtaatagtctctttgcgttgacggaaagcagactagaaataacaggctaaaatgttcagacaccataatagttcccaacccagataataacagagtaccatcaacacattcctttaaactcaatcccaaacccaaaaccgttaaaatgtatccggccaattgatagtagataatgaggtgtacagcgcatgataatttacacagtaaccaaaatgaaaatactttagtaattataagaaatatagatggtaacgtcatcatcaacaatccaataatatgccggagagtaaacattgacggataaaacaaaaatgctccgcataactctatcatggcaataacacaaccaaatacttgtaagattcctaaattagtagaaaatacaacggatatcgatgtataagtgatctcgagaaataataagaataaagtaatgcccgtaaagataaacatcaacattgtttggtaatcattaaaccaattagtatgaagttgaactaatttcacagtagattttattccagtattatccccgcatgtatacgtacctggtaagatatctttatattccataatcaatgagacatcactatctgataacgaatgaagtctagcactagtatgccatttacttaatatggtcgtcttggaagttttattataagttaaaatatcatggttatccaatttccatctaatatactttgtcggattatctatagtacacggaataatgatggtatcattacatgctgtatactctatggtctttgtagttgttataacaaccaacgtatagaggtatatcaacgatattctaactcttgacattttttatttatttaaaatgatacctttgttatttattttattctattttgctaacggtattgaatggcataagtttgaaacgagtgaagaaataatttctacttacttattagacgacgtattatacacgggtgttaatggggcggtatacacattttcaaataataaactaaacaaaactggtttaactaataataattatatcacaacatctataaaagtagaggatgcggataaggatacattagtatgcggaaccaataacggaaatcccaaatgttggaaaatagacggttcagacgacccaaaacatagaggtagaggatacgctccttatcaaaatagcaaagtaacgataatcagtcacaacggatgtgtactatctgacataaacatatcaaaagaaggaattaaacgatggagaagatttgacggaccatgtggttatgatttatacacggcggataacgtaattccaaaagatggtttacgaggagcattcgtcgataaagacggtacttatgacaaagtttacattcttttcactgatactatcggctcaaagagaattgtcaaaattccgtatatagcacaaatgtgcctaaacgacgaaggtggtccatcatcattgtctagtcatagatggtcgacgtttctcaaagtcgaattagaatgtgatatcgacggaagaagttatagacaaattattcattctagaactataaaaacagataatgatacgatactatatgtattcttcgatagtccttattccaagtccgcattatgtacctattctatgaataccattaaacaatctttttctacgtcaaaattggaaggatatacaaagcaattgccgtctccagctcctggtatatgtttaccagctggaaaagttgttccacataccacgtttgaagtcatagaaaaatataatgtactagatgatattataaagcctttatctaaccaacctatcttcgaaggaccgtctggtgttaaatggttcgatataaaggagaaggaaaatgaacatcgggaatatagaatatacttcataaaagaaaattctatatattcgttcgatacaaaatctaaacaaactcgtagctcgcaagtcgatgcgcgactattttcagtaatggtaacttcgaaaccgttatttatagcagatatagggataggagtaggaatgccacaaatgaaaaaaatacttaaaatgtaatcttaatcgagtacaccacacgacaatgaacaaacataagacagattatgctggttatgcttgctgcgtaatatgcggtctaattgttggaattatttttacagcgacactattaaaagttgtagaacgtaaattagttcatacaccatcaatagataaaacgataaaagatgcatatattagagaagattgtcctactgactggataagctataataataaatgtatccatttatctactgatcgaaaaacctgggaggaaggacgtaatgcatgcaaagctctaaatccaaattcggatctaattaagatagagactccaaacgagttaagttttttaagaagcattagacgcggatattgggtaggagaatccgaaatattaaaccagacaaccccatataattttatagctaagaatgccacgaagaatggaactaaaaaacggaaatatatttgtagcacaacgaatactcccaaactgcattcgtgttacactatataacaattacactacatttttatcataccactacttcggttagatgttttagaaaaaaataaatatcgccgtaccgttcttgtttttataaaaataacaattaacaattatcaaattttttctttaatattttacgtggttgaccattcttggtggtaaaataatctcttagtgttggaatggaatgctgtttaatgtttccacactcatcgtatattttgacgtatgtagtcacatcgtttacgcaatagtcagactgtagttctatcatgcttcctacattagaaggaggaacagttttaaagtctcttggttttaatctattaccgttagttttcatgaaatcctttgttttatccacttcacattttaaataaatgtccactatacattcttttgttaattttactagatcgtcatgggtcatagaatttataggttccgtagtccatggatccaaactagcaaacttcgcgtatacggtatcgcgattagtgtatacaccaactgtatgaaaattaagaaaacagtttaataaatcaacagaaatatttaatcctccgtttgatacagatgcgccatatttatggatttcggattcacacgttgtttgtctgaggtgttcgtctagtgttgcttctacgtaaacttcgattcccatatattctttattgtcagaatcgcataccgatttatcatcatacactgtttgaaaactaaatggtatacacatcaaaataataaataataacgagtacattctgcaatattgttatcgtaattggaaaattagtgttcgagtgagtcggattatgtgagtactggattgtatattttattttatattttgtaataagaataaaatgctaatgtcaagtttattccaatagatgtcttattaaaaaacatatataataaataacaatggctgaatggcataaaattatcgaggatatctcaaaaaataataagttcgaggatgccgccatcgttgattacaagactacaaagaatgttctagctgctattcctaacagaacatttgccaagattaatcctctcatcactaatcgtaatattctaaaacctcttattggtcagaaatattgtattgtatatactaactctctaatggatgagaacacgtatgctatggagttgcttactgggtacgcccctgtatctccgatcgttatagcgagaactcataccgcacttatatttttgatgggtaagccaacaacatccagacgtgacgtgtatagaacgtgtagagatcacgctacccgtgtacgcgcaactggtaattaaaataaaaagtaatattcatatgtagtatcaattttaaatgatgatgatgaaatggataatatccatattgacgatgtcaataatgccggtattggcatacagttcatcgatttttagatttcattcagaggatgtggaattatgttatgggcatttgtattttgataggatctataatgtagtaaatataaaatataatccgcatattccatatagatataattttattaatcgcacgttaaccgtagatgaactagacgataatgtcttttttacacatggttattttttaaaacacaaatatggttcacttaatcctagtttgattgtctcattatcaggaaacttaaaatataatgatatacaatgctcagtaaatgtatcgtgtctcattaaaaatttggcaacgagtacatctactatattaacatctaaacataagacttattctctacatcggtccacgtgtattactataataggatacgattctattatatggtataaagatataaatgacaagtataatgacatctatgattttactgcaatatgtatgctaatagcgtctacattgatagtgaccatatacgtgtttaaaaaaataaaaatgaactcttaattatgctatgctattagaaatggataaaatcaaaattacggttgattcaaaaattggtaatgttgttaccatatcgtataacttggaaaagataactattgatgttacacctaaaaagaaaaaagaaaaggatgtattattagcgcaatcagttgctgtcgaagaggcaaaagatgtcaaggtagaagaaaaaaatattatcgatattgaagatgacgatgatatggatgtagaaagcgcataatacgatctataaaaataagtatataaatactttttatttactgtactcttactgtgtagtggtgataccctactcgattatttttttaaaaaaatacttattctgattcttctagccatttccgtgttcgttcgaatgccacatcgacgttaaagataggggagtagttgaaatctagttctgcattgttggtacgcacctcaaatgtagtgttggatatcttcaacgtatagttgttgagtagtgatggttttctaaatagaattctcttcatatcattcttgcacgcgtacatttttagcatccatcttggaattctagatccttgttctattcccaatggtttcatcaatagaagattaaacatatcgtacgaacacgatggagagtaatcgtagcaaaagtaagcatttcctttaatctcagatcccggatactggatatattttgcagccaacacgtgcatccatgcaacatttcctacatatacccggctatgcaccgcgtcatcatcgactgtacgatacataatgttaccgtgttgcttacattgctcgtaaaagactttcgtcaatttgtctccttctccgtaaattccagtgggtcttaggcaacaagtatacaattttgctccattcatgattacggaattattggctttcataaccagttgctcggccatacgtttactttttgcgtatacatgtcctggtgatatatcataaagggtatgctcatggccgatgaatggatcaccgtgtttatttggtcctattgcttccatgctactagtatagatcaaatacttgattcctaggtccacacaagctgccaatatagtctgtgttccataatagtttactttcatgatttcattatcggtgtattttccaaatacatccactagagcagccgtatgaataatcagatttaccccatctagcgcttctctcaccttatcaaagtcgtttatatcacattgtatatagtttataaccttaactttcgaggttattggttgtggatcttctacaatatctatgactctgatttcttgaacatcatctgcactaattaacagttttactatatacctgcctagaaatccggcaccaccagtaaccgcgtacacggccattgctgccactcataatatcagactacttattctattttactaaataatggctgtttgtataatagaccacgataatatcagaggagttatttactttgaaccagtccatggaaaagataaagttttaggatcagttattggattaaaatccggaacgtatagtttgataattcatcgttacggagatattagtcaaggatgtgattccataggcagtccagaaatatttatcggtaacatctttgtaaacagatatggtgtagcatatgtttatttagatacagatgtaaatatatctacaattattggaaaggcgttatctatttcaaaaaatgatcagagattagcgtgtggagttattggtatttcttacataaatgaaaagataatacattttcttacaattaacgagaatggcgtttgatatatcagttaatgcgtctaaaacaataaatgcattagtttacttttctactcagcaaaataaattagtcatacgtaatgaagttaatgatacacactacactgtcgaatttgatagggacaaagtagttgacacgtttatttcatataatagacataatgacaccatagagataagaggggtgcttccagaggaaactaatattggttgcgcggttaatacgccggttagtatgacttacttgtataataagtatagttttaaactgattttagcagaatatataagacacagaaatactatatccggcaatatttattcggcattgatgacactagatgatttggctattaaacagtatggagacattgatctattatttaatgagaaacttaaagtagactccgattcgggactatttgactttgtcaactttgtaaaggatatgatatgttgtgattctagaatagtagtagctctatctagtctagtatctaaacattgggaattgacaaataaaaagtataggtgtatggcattagccgaacatatatctgatagtattccaatatctgagctatctagactacgatacaatctatgtaagtatctacgcgggcacactgagagcatagaggatgaatttgattattttgaagacgatgattcgtctacatgttctgccgtaaccgacagggaaacggatgtataattttttttatagcgtgaaggatatgataaaaaatataattgttgtatttatcccattccaatcaccttatatgattctgtaaaaaaattatactgtaacacaatgaaggagtcttatagatgtatagaggtcagatactggtttgataaactgtttattccacataagtatgtttgactttatggttagacccgcatactttaacaaatcactgaaaattggagttaggtattgacctctcagaatcagttgccgttctggaacattaaatgtattttttatgatatactccaacgcatttatgtgggcatacaacaagtcattactaatggagtattccaagagaagagatttcaacagactgtttatgaactcgaatgccgcctcattgtcgcttatattgatgatgtcgaattctcccaatatcatcaccgatgagtagctcatcttgttatcgggatccaagttttctaaagatgtcattaaaccctcgatcatgaatggatttatcatcatcgtttttatgttggacatgagcttagtccgtttgtccacatctatagacgacgatttctgaattatttcatatatccctctctttaactccaggaacttgtcaggatggtctactttaatatgttctcgtctaagagatgaaaatctttggatggttgcacgcgacttttctctaaaggatgacgttgcccaagatcctctcttaaatgaatccatcttatccttggacaagatggacagtctattttccttagatggtttaatatttttgttacccatgatctataaaggtagacctaatcgtctcggatgaccatatatttattttcagttttattatacgcataaattgtaaaaaatatgttaggtttacaaaaatgtctcgtggggcattaatcgtttttgaaggattggacaaatctggaaaaacaacacaatgtatgaacatcatggaatcaataccttcaaacacaataaaataccttaactttcctcagagatccactgtcactggaaagatgatagatgactatctaactcgtaaaaaaacctataatgatcatatagttaatctattattttgtgcaaatagatgggagtttgcatcttttatacaagaacaactagaacagggaattactttaatagttgatagatacgcattttctggagtagcgtatgccgccgctaaaggcgcgtcaatgactctcagtaagagttatgaatctggattgcctaaacccgacttagttatattcttggaatctggtagcaaagaaattaatagaaacgtcggcgaggaaatttatgaagatgttacattccaacaaaaggtattacaagaatataaaaaaatgattgaagaaggagatattcattggcaaattatttcttctgaattcgaggaagatgtaaagaaggagttgattaagaatatagttatagaggctatacacacggttactggaccagtggggcaactgtggatgtaatagtgaaattacattttttataaatagatgttagtacagtgttataaatggatgaagcatattactctggcaacttggaatcagtactcggatacgtgtccgatatgcataccgaactcgcatcaatatctcaattagttattgccaagatagaaactatagataatgatatattaaacaaggacattgtaaattttatcatgtgtagatcaaacttggataatccatttatctctttcctagatactgtatatactattatagatcaagagatctatcagactgagttgattaattcattagacgacaatgaaattatcgattgtatagttaataagtttatgagcttttataaggataacctagaaaatatagtagatgctatcatcactctaaaatatataatgaataatccagattttaaaactacgtatgcagaagtactcggttccagaatagcggatatagatattaaacaagtgatacgtgagaatatactacaattgtctaatgatatccgcgaacgatatttgtgaaaaatattaaaaaaaaatactttttttattaaatgacgtcgcttcgcgaatttagaaaattatgctgtgatatatatcacgcatcaggatataaagaaaaatctaaattaattagagactttataacagatagggatgataaatatttgatcattaagctattgcttcccggattagacgatagaatttataacatgaacgataaacaaattataaaattatatagtataatatttaaacaatctcaggaagatatgctacaagatttaggatacggatatataggagacactattaggactttcttcaaagagaacacagaaatccgtccacgagataaaagcattttaactttagaagaagtggatagttttttaactacgttatcatccgtaactaaagaatcgcatcaaataaaattattgactgatatcgcatccgtttgtacatgtaatgatttaaaatgtgtagtcatgcttattgataaagatctaaaaattaaagcgggccctcggtacgtacttaacgctattagtcctcatgcctatgatgtgtttagaaaatctaataacttgaaagagataatagaaaatgcatctaaacaaaatctagactctatatctatttctgttatgactccaattaatcccatgttagcggaatcgtgtgattctgtcaataaggcgtttaaaaaatttccatcaggaatgtttgcggaagtcaaatacgatggtgaaagagtacaagttcataaaaataataacgagtttgccttctttagtagaaacatgaaaccagtactctctcataaagtggattatctcaaagaatacataccgaaagcatttaaaaaagctacgtctatcgtattggattctgaaattgttcttgtagacgaacataatgtaccgctcccgtttggaagtttaggtatacacaaaaagaaagaatataaaaactctaacatgtgtttgttcgtgtttgactgtttgtactttgatggattcgatatgacggacattccattgtacgaacgaagatcttttctcaaagatgttatggttgaaatacccaatagaatagtattctcagagttgacgaatattagtaacgagtctcagttaactgacgtattggatgatgcactaacgagaaaattagaaggattggtcttaaaagatattaatggagtatacgaaccgggaaagagaagatggttaaaaataaagcgagactatttgaacgagggttccatggcagattctgccgatttagtagtactaggtgcttactatggtaaaggagcaaagggtggtatcatggcagtctttctaatgggttgttacgacgatgaatccggtaaatggaagacggttaccaagtgttcaggacacgatgataatacgttaagggagttgcaagaccaattaaagatgattaaaattaacaaggatcccaaaaaaattccagagtggttagtagttaataaaatctatattcccgattttgtagtagaggatccaaaacaatctcagatatgggaaatttcaggagcagagtttacatcttccaagtcccataccgcaaatggaatatccattagatttcctagatttactaggataagagaggataaaacgtggaaagaatctactcatctaaacgatttagtaaacttgactaaatcttaatagttacatacaaattaaaataacactatttagttggtggtcgccatggatggtgttattgtatactgtctaaacgcgttagtaaaacatggcgaggaaataaatcatataaaaaatgatttcatgattaaaccatgttgtgaaaaagtcaagaacgttcacattggcggacaatctaaaaacaatacagtgattgcagatttgccatatatggataatgcggtatccgatgtatgcaattcactgtataaaaagaatgtatcaagaatatccagatttgctaatttgataaagatagatgacgatgacaagactcctactggtgtatataattattttaaacctaaagatgccattcctgttattatatccataggaaaggatagagatgtttgtgaactattaatctcatctgataaagcgtgtgcgtgtatagagttaaattcatataaagtagccattcttcccatggatgtttccttttttaccaaaggaaatgcatcattgattattctcctgtttgatttctctatcgatgcggcacctctcttaagaagtgtaaccgataataatgttattatatctagacaccagcgtctacatgacgagcttccgagttccaattggttcaagttttacataagtataaagtccgactattgttctatattatatatggttgttgatggatctgtgatgcatgcaatagctgataatagaacttacgcaaatattagcaaaaatatattagacaatactacaattaacgatgagtgtagatgctgttattttgaaccacagattaggattcttgatagagatgagatgctcaatggatcatcgtgtgatatgaacagacattgtattatgatgaatttacctgatgtaggcgaatttggatctagtatgttggggaaatatgaacctgacatgattaagattgctctttcggtggctggtatttggaaagttttataggtagttgatagaacaaaatacataattttgtaaaaataaatcactttttatactaatatgacacgattaccaatacttttgttactaatatcattagtatacgctacaccttttcctcagacatctaaaaaaataggtgatgatgcaactttatcatgtaatcgaaataatacaaatgactacgttgttatgagtgcttggtataaggagcccaattccattattcttttagctgctaaaagcgacgtcttgtattttgataattataccaaggataaaatatcttacgactctccatacgatgatctagttacaactatcacaattaaatcattgactgctagagatgccggtacttatgtatgtgcattctttatgacatcgcctacaaatgacactgataaagtagattatgaagaatactccacagagttgattgtaaatacagatagtgaatcgactatagacataatactatctggatctacacattcaccggaaactagttctgagaaacctgattatatagataattctaattgctcgtcggtattcgaaatcgcgactccggaaccaattactgataatgtagaagatcatacagacaccgtcacatacactagtgatagcattaatacagtaagtgcatcatctggagaatccacaacagacgagactccggaaccaattactgataaagaagaagatcatacagttacagacactgtctcatacactacagtaagtacatcatctggaattgtcactactaaatcaaccaccgatgatgcggatctttatgatacgtacaatgataatgatacagtaccatcaactactgtaggcggtagtacaacctctattagcaattataaaaccaaggactttgtagaaatatttggtattaccgcattaattatattgtcggccgtggcaatattctgtattacatattatatatataataaacgttcacgtaaatacaaaacagagaacaaagtctagatttttgacttacataaatgtctgggatagtaaaatctatcatattgagcgggccatctggtttaggaaagacagccatagccaaaagactatgggaatatatttggatttgtggtgtcccataccactagatttcctcgtcctatggaacgagaaggtgtcgattaccattacgttaacagagaggccatctggaagggaatagccgccggaacatactgagtttttaggaaatatttacggaacttctaaaactgctgtgaatacagcggctattaataatcgtatttgtgtgatggatctaaacatcgacggtgttagaagttttaaaaatacttacctaatgccttactcggtgtatataagacctacctctcttaaaatggttgagaccaagcttcgttgtagaaacactgaagcggatgatgagattcatcgtcgtgtgatgttggcaaaaactgacatggatgaggcaggtgaagccggtctattcgacactattatcattgaagatgatgtgaatttagcatatagtaagttaattcagatactacaggaccgtattagaatgtattttaacactaattagagacttaagacttaaaacttgataattaataatataactcgtttttatatgtggctatttcaacgtctaatgtattagttaaatattaaaacttaccacgtaaaacttaaaatttaaaatgatatttcattgacagatagatcacacattatgaactttcaaggacttgtgttaactgacaattgcaaaaatcaatgggtcgttggaccattaataggaaaaggtggatttggtagtatttatactactaatgacaataattatgtagtaaaaatagagcccaaagctaacggatcattatttaccgaacaggcattttatactagagtacttaaaccatccgttatcgaagaatggaaaaaatctcacaatataaagcacgtaggtcttatcacgtgcaaggcatttggtctatacaaatccattaatgtggaatatcgattcttggtaattaatagattaggtgcagatctagatgcggtgatcagagccaataataatagattaccaaaaaggtcggtgatgttgatcggaatcgaaatcttaaataccatacaatttatgcacgagcaaggatattctcacggagatattaaagcgagtaatatagtcttggatcaaatagataagaataaattatatctagtggattacggattggtttctaaattcatgtctaatggcgaacatgttccatttataagaaatccaaataaaatggataacggtactctagaatttacacctatagattcgcataaaggatacgttgtatctagacgtggagatctagaaacacttggatattgtatgattagatggttgggaggtatcttgccatggactaagatatctgaaacaaagaattgtgcattagtaagtgccacaaaacagaaatatgttaacaatactgcgactttgttaatgaccagtttgcaatatgcacctagagaattgctgcaatatattaccatggtaaactctttgacatattttgaggaacccaattacgacaagtttcggcacatattaatgcagggtgtatattattaagtgtggtgtttggttgatgtaaaatttttgtcgataaaaattaaaaaataacttaatttattattgatctcgtgtgtacaaccgaaatcatggcgatgttttacgcacacgctctcggtgggtacgacgagaatcttcatgcctttcctggaatatcatcgactgttgccaatgatgtcagtttataataacaagtatgacattgtaaaagacaaatatatgtggtgttacagtcaggtgaacaagagatatattggagcactgctgcctatgtttgagtgcaatgaatatctacaaattggagatccgatccatgatcaagaaggaaatcacatatcgccacaaaaactactatgctctaagcggaatcgggtacgagagtctagacttgtgtttggaaggagtagggattcatcatcacgtacttgaaacagaaaacgctgtatatggaaaagttcaacatgattattctactatcaaagagaaggccaaagaaatgaatgcactcagttcaggacctatcatcgattaccacgtctggataggagattgtatctgtcaagttactgctgtggacgtacatggaaaggaaattatgagaatgagattcaaaaagggtgcggtgcttccgatcccaaatctggtaaaagttaaacttggggagaatgatacagaaaatctttcttctactatatcggcggcaccatcgaggtaaccacctctctggaagacagtgtgaatcatgtactcatgaaacgtttggaatctatacgccatatgtggtctgttgtatatgatcattttgatattgtgaatggtaaagaatgctgttatgtgcatacgcatttgtctaatcaaaatcttataccgagtactgtaaaaacaaatttgtacatgaagactatgggatcatgcattcaaatgagtatcttagcgaactgaaggaatcaggtggatggagtcccagaccagaaatgcaggaatttgaatatccagatggagtggaagacactgaatcaattgagagattggtagaggagttcttcaatagatcagaacttcaggctggtaaatctattaatgttaaacatacatctgtttcagctaagcaactaagaacacgtatactctcatcttttgccaacacagagggtggatatttgttcattggagttgataataatacacacaaagtatttggattcacggtgggttacgactacctcagactgatagagaatgatatagaaaagcatatcaaaagactttgtgttgtgtatttctgtgagaagaaagaggacatcaagtacacgtgtcgattcatcaagtggggatgaggctacctcgacatacgtgtgcgctatcaaagtggaaagatgctgttgtgctgtgtttgcagattggccagaatcatggtatcaagaagtattctccagatgaataggtgtcacatataaaattttaattaatgtaactatagagaacaaataataggttgtaatatcatatagacaataactaacaattaattagtaactgttatctctttttaactaactaactatacctattaatacatcgtaattatagttcttaacatctattaatcattgattcgcttctttaattttttataaaccaacattgttaattgaaaagggataacatgttacagaatataaattatatatggattttttttaaaaaggaaatacttgactggagtgtatatttatctcttcattatataacacgcgtgttttccaatttttccacatcccatataatacaggattataatctcgttcgaacatacgagaaagtggataaaacaatagttgattttttatctaggttgccaaatttattccatattttagaatatggggaaaatattctacatatttattctatggatgatgctaatacgaatattataattttttttctagatagagtattaaatattaataagaacgggtcatttatacacaatctcaggttatcatcatccattaatataaaagaatatgtatatcaattagttaataatgatcatccagataataggataagactaatgcttgaaaatggacgtagaacaagacattttttgtcctatatatcagatacagttaatatctatatatgtattttatatagatgccgaagacagttacggttgtacattattacatagatgtatatatcactataagaaatcagaatcagaatcagaatcatacaatgaattaattaagatattgttaaataatggatcagatgtagataaaaaagatacgtacggaaacacaccttttatcctattatgtaaacacgatatcaacaacgtggaattgtttgagatatgtttagagaatgctaatatagactctgtagactttaatagatatacacctcttcattatgtctcatgtcgtaataaatatgattttgtaaagttattaatttctaaaggagcaaatgttaatgcgcgtaataaattcggaactactccattttattgtggaattatacacggtatctcgcttataaaactatatttggaatcagacacagagttagaaatagataatgaacatatagttcgtcatttaataatttttgatgctgttgaatctttagattatctattatccagaggagttattgatattaactatcgtactatttacgacgctgtcagttataatgcgtataatacgttggtctatctattaaacagaaatggtgattttgagacgattactactagtggatgtacatgtatttcggaagcagtcgcaaacaacaacaaaataataatggaagtactattgtctaaacgaccatctttgaaaattatgatacagtctatgatagcaattactaaacataaacagcataatgcagatttattgaaaatgtgtataaaatatactgcgtgtatgaccgattatgatactcttatagatgtacaatcactacagcaatataaatggtatattttaagatgtttcgatgaaatagatatcatgaagagatgttatataaaaaataaaactgtattccaattagttttttgtatcaaagacattaatactttaatgagatacggtaaacatccttctttcgtgaagtgcactagtctcgacgtatacggaagtcgtgtacgtaatatcatagcatctattagatatcgtcagagattaattagtctattatccaagaagctggatcctggagataaatggtcgtgttttcctaacgaaataaaatataacgataacgaactgtccacatatctaaaaatcttataaacactattaaaatataaaatcacactacatcattgtttccttttagtgctcgacagtgtatactatttttaacgctcataaataaaaatgaaaacgatttccgttgttacgttgttatgcgtactacctgctgttgtttattcaacatgtactgtacccactatgaataacgctaaattaacgtctaccgaaacatcgtttaataataaccagaaagttacgtttacatgtgatcagggatatcattcttcggatccaaatgctgtctgcgaaacagataaatggaaatacgaaaatccatgcaaaaaaatgtgcacagtttctgattacatctctgaactatataataaaccgctatacgaagtgaattccaccatgacactaagttgcaacggcgaaacaaaatattttcgttgcgaagaaaaaaatggaaatacttcttggaatgatactgttacgtgtcctaatgcggaatgtcaacctcttcaattagaacacggatcgtgtcaaccagttaaagaaaaatactcatttggggaatatatgactatcaactgtgatgttggatatgaggttattggtgcttcgtacataagttgtacagctaattcttggaatgttattccatcatgtcaacaaaaatgtgatatgccgtctctatctaacggattaatttccggatctacattttctatcggtggcgttatacatcttagttgtaaaagtggttttacactaacggggtctccatcatccacatgtatcgacggtaaatggaatcccgtactcccaacatgtgtacgatctaacgaaaaatttgatccagtggatgatggtcccgacgatgagacagatttgagcaaactctcgaaagacgttgtacaatatgaacaagaaatagaatcgttagaagcaacttatcatataatcatagtggcgttaacaattatgggcgtcatatttttaatctccgttatagtattagtttgttcctgtgacaaaaataatgaccaatataagttccataaattgctaccgtgaatataaatccgttaaaataattaataatttaataacaaacaagtatcaaaagattaaagacttatagctagaatcaattgagatgtcttcttcagtggatgttgatatctacgatgccgttagagcatttttactcaggcactattataacaagagatttattgtgtatggaagaagtaacgccatattacataatatatacaggctatttacaagatgcgccgttataccgttcgatgatatagtacgtactatgccaaatgaatcacgtgttaaacaatgggtgatggatacacttaatggtataatgatgaatgaacgcgatgtttctgtaagcgttggcaccggaatactattcatggaaatgtttttcgattacaataaaaatagtatcaacaatcaactaatgtatgatataattaatagcgtatctataattctagctaatgagagatatagaagcgcttttaacgacgatggtatatacatccgtagaaatatgattaacaagttgtacggatacgcatctctaactactattggcacgatcgctggaggtgtttgttattatctgttgatgcatctagttagtttgtataaataattatttcaatatactagttaaaattttaagattttaaatgtataaaaaactaataacgtttttatttgtaataggtgcattagcatcctattcgaataatgagtacactccgtttaataaactgagtgtaaaactctatatagatggagtagataatatagaaaattcatatactgatgataataatgaattggtgttaaattttaaagagtacacaatttctattattacagagtcatgcgacgtcggatttgattccatagatatagatgttataaacgactataaaattattgatatgtataccattgactcgtctactattcaacgcagaggtcacacgtgtagaatatctaccaaattatcatgccattatgataagtacccttatattcacaaatatgatggtgatgagcgacaatattctattactgcagagggaaaatgctataaaggaataaaatatgaaataagtatgatcaacgatgatactctattgagaaaacatactcttaaaattggatctacttatatatttgatcgtcatggacatagtaatacatattattcaaaatatgatttttaaaaatttaaaatatattatcacttcagtgacagtagtcaaataacaaacaacaccatgagatatattataattctcgcagttttgttcattaatagtatacatgctaaaataactagttataagtttgaatccgtcaattttgattccaaaattgaatggactggggatggtctatacaatatatcccttaaaaattatggcatcaagacgtggcaaacaatgtatacaaatgtaccagaaggaacatacgacatatccgcatttccaaagaatgatttcgtatctttctgggttaaatttgaacaaggcgattataaagtggaagagtattgtacgggactatgcgtcgaagtaaaaattggaccaccgactgtaacattaactgaatacgacgaccatatcaatttgtacatcgagcatccgtatgctactagaggtagcaaaaagattcctatttacaaacgcggtgacatgtgtgatatctacttgttgtatacggctaacttcacattcggagattctaaagaaccagtaccatatgatatcgatgactacgattgcacgtctacaggttgcagcatagactttgtcacaacagaaaaagtgtgcgtgacagcacagggagccacagaagggtttctcgaaaaaattactccatggagttcgaaagtatgtctgacacctaaaaagagtgtatatacatgcgcaattagatccaaagaagatgttcccaatttcaaggacaaaatggccagagttatcaagagaaaatttaatacacagtctcaatcttatttaactaaatttctcggtagcacatcaaatgatgttaccacttttcttagcatgcttaacttgactaaatattcataactaatttttattaatgatacaaaaacgaaataaaactgcatattatacactggttaacgcccttataggctctaaccattttcaagatgaggtccctgattatagtccttctgttcccctctatcatctactccatgtctattagacgatgtgagaagactgaagaggaaacatggggattgaaaatagggttgtgtataattgccaaagatttctatcccgaaagaactgattgcagtgttcatctcccaactgcaagtgaaggattgataactgaaggcaatggattcagggatatacgaaacaccgataaattataaaaaaagcaatgtgtccgctgtttccgttaataatactattttcgtaactggcggattattcataaataactctaatagcacgatcgtggttaacaatatggaaaaacttgacatttataaagacaaacaatggtcgattatagaaatgcctatggctagggtatatcacggcatcgactcgacatttggaatgttatattttgccggaggtctatccgttaccgaacaatatggtaatttagagaaaaacaacgagatatcttgttacaatcctagaacgaataagtggtttgatatttcatatactatttataagatatccatatcatcattgtgtaaactaaataacgtcttctatgtatttagtaaggacattggatatgtggaaaagtatgatggtctccccgctataaaggcattatcaacttctccttattgattgaaaatgaaaatataaatagtttttatgtatagcagtattaccctatagttttattgcttactactaacatggatacagatgttacaaatgtagaagatatcataaatgaaatagatagagagaaagaagaaatactaaaaaatgtagaaattgaaaataataaaaacattaacaagaatcatccaagtggatatattagagaagcactcgttattaataccagtagtaatagtgattccattgataaagaagttatagaatgtatcagtcacgatgtaggaatatagatcatatctactaatttttataatcgatacaaaacataaaaaacaactcgttattacatagcaggcatggaatccttcaagtattgttttgataacgatggcaagaaatggattatcggaaatactttatattctggtaattcaatactctataaggtcagaaaaaatttcactagttcgttctacaattacgtaatgaagatagatcacaaatcacacaagccattgttgtctgaaatacgattctatatatctgtattggatcctttgactatcgacaactggacacgggaacgtggtataaagtatttggctattccagatctgtatggaattggagaaaccgatgattatatgttcttcgttataaagaattcgggaagagtattcgccccaaaggatactgaatcagtcttcgaagcatgcgtcactatgataaacacgttagagtttatacactctcaaggatttacccatggaaaaatagaaccgaggaatatactgattagaaataaacgtctttcactaattgactattctagaactaacaaactatacaagagtggaaactcacatatagattacaacgaggacatgataacttcaggaaatatcaattatatgtgtgtagacaatcatcttggagcaacagtttcaagacgaggagatttagaaatgttgggatattgcatgatagaatggttcggtggcaaacttccatggaaaaacgaaagtagtataaaagtaataaaacaaaaaaaagaatataaaaaatttatagctactttctttgaggactgttttcctgaaggaaatgaacctctggaattagttagatatatagaattagtatacacgttagattattctcaaactcctaattatgacagactacgtaaactgtttatacaagattgaaattatattcttttttttatagagtgtggtagtgttacggatatttaatattagactatctctatcgcgctacacgaccaatatcgattactatggatatcttctatgaaaggagagaatgtattcatttctccagcgtcaatctcgtcagtattgacaatactgtattatggagctaatggatccactgctgaacagctatcgaaatatgtagaaacggaggagaacacggataaggttagcgctcaaaatatctcattcaaatccataaataaagtatatgggcgatattctgccgtgtttaaagattcctttttgagaaaaattggcgataagtttcaaactgttgacttcactgattgtcgcactatagatgcaatcaacaagtgtgtagatatctttactgaggggaaaatcaatccactattggatgaaccattgtctcctagcaattagtgccgtatactttaaagcaaaatggttgacgccattcgaaaaggaatttaccagtgattatcccttttacgtatcaccaacggaaatggtagacgtaagtatgatgtctatgtacggcgagctatttaatcacgcatctgtaaaagaatcattcggcaacttttcaatcatagaactgccatatgttggagatactagtatgatggtcattcttccagacaagattgatggattagaatccatagaacaaaatctaacagatacaaattttaagaaatggtgtgactttatggatgctatgtttatagatgttcacattcccaagtttaaggtaacaggttcgtataatcttgtggatactctagtaaagttgggactgacagaggtgttctattcaactggcgattatagcaatatgtgtaattcagatgtgagtgtcgacgctatgatccacaaaacgtatatagatgtcaatgaagagtatacagaagcagctgcagcaacttctgtactagtggcagactgtgcatcaacagttacaaatgagttctgtgcagatcatccgttcatctatgtgattaggcatgttgatggcaaaattcttttcgttggtagatattgctctccaacaactaattgttaaccattttttttaaaaaaaatagaaaaaacatgtggtattagtgcaggtcgttgttcttccaattgcaattggtaagatgacggccaactttagtacccacgtcttttcaccacagcactgtggatgtgacagactgaccagtattgatgacgtcaaacaatgtttgactgaatatatttattggtcgtcctatgcataccgcaacaggcaatgcgctggacaattgtattccacactcctctcttttagagatgatgcggaattagtgttcatcgacattcgcgagctggtaaaaaatatgccgtgggatgatgtcaaagattgtacagaaatcatccgttgttatataccggatgagcaaaaaaccatcagagagatttcggccatcatcggactttgtgcatatgctgctacttactggggaggtgaagaccatcccactagtaacagtctgaacgcattgtttgtgatgcttgagatgctaaattacgtggattataacatcatattccggcgtatgaattgatgagttgtacatcttgacattttctttcttctcttctccctttcttctcttctcccttcctccctcttctccctttcccagaaacaaacttttttacccactataaaataaaatgagtatactacctgttatatttctttctatatttttttattcttcattcgttcagacttttaacgcgcctgaatgtatcgacaaagggcaatattttgcatcattcatggagttagaaaacgagccagtaatcttaccatgtcctcaaataaatacgctatcatccggatataatatattagatattttatgggaaaaacgaggagcggataatgatagaattataccgatagataatggtagcaatatgctaattctgaacccgacacaatcagactctggtatttatatatgcattaccacgaacgaaacctactgtgacatgatgtcgttaaatttgacaatcgtgtctgtctcagaatcaaatatagatcttatctcgtatccacaaatagtaaatgagagatctactggcgaaatggtatgtcccaatattaatgcatttattgctagtaacgtaaacgcagatattatatggagcggacatcgacgccttagaaataagagacttaaacaacggacacctggaattattaccatagaagatgttagaaaaaatgatgctggttattatacatgtgttttagaatatatatacagaggtaaaacatataacgtaaccagaattgtaaaattagaggtacgggataaaataataccttctactatgcaattaccagatggcattgtaacttcaataggtagtaatttgactattgcgtgtagagtatcgttgagacctcccacaacggatgcagacgtcttttggataagtaatggtatgtattacgaagaagatgatggggacggaaacggtagaataagtgtagcaaataaaatctatatgaccgataagagacgtgttattacatcccggttaaacattaatcctgtcaaggaagaagatgctacaacgtttacgtgtatggcgtttactattcctagcatcagcaaaacagttactgttagtataacgtgaatgtatgttgttacatttccatgtcaattgagtttataagaatttttatacattatcttccaacaaacaattgacgaacgtattgctatgattaactcccacgatactatgcatattattaatcattaacttgcagactatacctagtgctattttgacatactcatgttcttgtgtaattgcggtatctatattattaaagtacgtaaatctagctatagttttattatttaattttagataatataccgtctccttatttttaaaaattgccacatcctttattaaatcatgaatgggaatttctatgtcatcgttagtatattgtgaacaacaagagcagatatctataggaaagggtggaatgcgatacattgatctatgtagttttaaaacacacgcgaactttgaagaatttatataaatcattccatcgatacatccttctatgttgacatgtatatatccaggaattcgtttattaatatcgggaaatgtataaactaaaacattgcccgaaagcggtgcctctatctgcgttatatccgttcttaacttacaaaatgtaaccaatacctttgcatgacttgttttgttcggcaacgttagtttaaacttgacgaatggattaattacaatagcatgatccgcgcatctattaagtttttttactttaacgcccttgtatgtttttacagagactttatctaaatttctagtgcttgtatgtgttataaatataacgggatatagaaccgaatcacctaccttagatacccaattacattttatcagatccagataataaacaaattttgtcgccctaactaattctatattgttatatattttacaattggttatgatatcatgtaataacttggagtctaacgcgcatcgtcgtacgtttatacaattgtgatttagtgtagtatatctacacatgtatttttccgcactatagtattctggactagtgataaaactatcgttatatctgtcttcaatgaactcatcgagatattgctctctgtcatattcatacacctgcataaactttctagacatcttacaatccgtgttattttaggatcatatttacatatttacgggtatatcaaagatgttagattagttaatgggaatcgtctataataatgaatattaaacaattatatgaggacttttaccacaaagcatcataaaaatgagtcgtcgtctgatttatgttttaaatatcaaccgcgaatcaactcataaaatacaagagaatgaaatatatacatattttagtcattgcaatatagaccatacttctacagaacttgattttgtagttaaaaactatgatctaaacagacgacaacctgtaactgggtatactgcactacactgctatttgtataataattactttacaaacgatgtactgaagatattattaaatcatggagtggatgtaacgatgaaaaccagtagcggacgtatgcctgtttatatattgcttactagatgttgtaatatttcacatgatgtagtgatagatatgatagacaaagataaaaaccacttattacatagagactattccaacctactactagagtatataaaatctcgttacatgttattgaaggaagaggatatcgatgagaacatagtatccactttattagataagggaatcgatcctaactttaaacaagacggatatacagcgttacattattattatttgtgtctcgcacacgtttataaaccaggtgagtgtagaaaaccgataacgataaaaaaggccaagcgaattatttctttgtttatacaacatggagctaatctaaacgcgttagataattgtggtaatacaccattccatttgtatcttagtattgaaatgtgtaataatattcatatgactaaaatgctgttgacttttaatccgaatttcgaaatatgtaataatcatggattaacgcctatactatgttatataacttccgactacatacaacacgatattcttgttatgttaatacatcactatgaaacaaatgttggagaaatgccgatagatgagcgtcgtataatcgtattcgagtttatcaaaacatattctacacgtccggcagattcgataacttatttgatgaataggtttaaaaatataaatatttatacccgctatgaaggaaagacattattacacgtagcatgtgaatataataatacacacgtaatagattatcttatacgtatcaacggagatataaatgcgttaaccgacaataacaaacacgctacacaactcattatagataacaaagaaaattccccatataccattaattgtttactgtatatacttagatatattgtagataagaatgtgataagatcgttggtggatcaacttccatctctacctatctttcgtcgcttatcatactagtcatatcctaaatgttgatcatattccaccaaatgattgtgaaagagattgagattaaatcgtctaacaaacaattagtttttatgacattaacatataataaataaattaatcattattgacttaacgatgacgaaagttatcatcatcttaggattcttgattattaatacaaattcattgtctatgaaatgtgaacaaggtgtctcatattataattcacaagaattaaagtgttgtaaactatgtaagccaggaacatattcagatcatcgatgtgataaatacagcgataccatttgtggacattgtccgagtgacacattcacgtcaatatataatcgttctccttggtgtcatagttgtagaggtccatgtggtactaatcgagtagaggtcacaccttgtacacctaccacaaatagaatctgtcattgtgactcgaatagttattgtctccttaaagcttctgatggtaactgtgttacatgtgctcctaaaacaaaatgtggtcgtgggtatggaaagaaaggagaagatgaaatgggtaataccatttgtaagaaatgtcggaagggtacttattcagatattgtatctgactctgatcaatgtaaaccaatgacaagataagacttactcgcatctactggatagacataaaatatcctcctcgtaataatgaaatataatatacactaattattaatatcaataacaatcgagtattaatatataggtcatttttaaatcccttttgggttccgtcccaaacggcgtttcggtctgcgtcgccgccatggccatgccgagcctctccgcgtgctcctccatcgaggacgacttcaactatggcagctcggtggcgtctgccagcgtgcacatacgaatggcatttctaagaaaagtctacggtatcctttgtctacaatttcttttaacaacggcaacaactgcagtatttttatactttgactgcatgcggacatttatacaagggagtcctgttctaatattggcatcaatgttcggatctataggcttgattttcgcattgactttacacagacataaacatcccctgaatctgtacctgctttgtggatttacactgtcggaatctctaacgctggcctctgttgttactttctatgatgtgcatgtcgttatgcaagctttcatgctgactactgcagcgtttcttgctctgactacatatactctacaatcaaagagagatttcagtaaacttggagcaggattgtttgctgctttgtggattttaattttgtcaggactcttggggatatttgtgcaaaatgagacagtgaagctggtcctgtctgcttttggggcccttgtattctgtggattcattatctatgacacgcactcactaatacataagctctcgcctgaagagtatgtgttagcctctatcaatctctacttggatatcatcaatctgttcttgcatctgttgcagcttttggaagtatctaataagaaataaagtttaaaatagaattaataaaaacatataggtcattttttaaacatggattggaaaccaaggtagttagttaatacacacaagatatatttttttcacatcatccacccatgggtaacaccaaggttgttagttaataatatacaagatattttttctcactctgatccatgtaaaccaaggacgagataagacactctcattcctcatccacaacccattaaaaaaatggaaattaaagccctctattagcataaacggctacaggtctaccttcacaatggcctttccttgtgcccagttcagaccctgtcattgccacgctactaaggactccctgaataccgtggccgacgtcagacattgtctgactgaatacatcctgtgggtttctcatagatggacccatagagaaagcgcagggcctctctacaggcttctcatctctttcagaactgatgcaacggagctctttggtggtgagttgaaggattcacttccgtgggacaattgcgtggagatcattaaatgtttcatcagaaatgactccatgaaaaccgccaaagaacttcgtgcaatcattggactttgtactcaatcagctatcgtctctggaagagtcttcaacgataagtatatcgacatactacttatgctgcgaaagattctgaacgagaacgactatctcaccctcttggatcatatccgcactgctaaatactaaatctccttcatgctctctcactacactttttatcatcttatgaggaatgattgccttcgtgaaataggaataattagcaccagaatagctatggattattgtggtagagagtgcactattctatgtcgtctactggatgaagatgtgacgtacaaaaaaataaaaccagagattgaaacgtgtcacaacttatcaaaacatatagatagacgaggaaacaatgcgctacattgttacgtcttcaataaatgcgatacagacattaagattgttcggctgttactctctcgcggagtcgagagactttgtagaaacaacgaaggattaactccgctaggagcatacagtaagcatagatacgtcaaatctcagattgtgcatctactgatatccagctattcgaattcctctaacgaactcaagtcgaatataaatgatttcgatctgtattcgtataatatcgacttacgtctgctaaaatacctaattgtggataaacggatacgtccgtccaagaatacgaattatgcaatcaatggtctcggattggtggatatatacgtaacgacgcctaatccgagaccagaagtattgctatggcttcttaaatcagaatgttacagcaccggttacgtatttcgtacctgtatgtacgacagtgatatgtgtaagaactctcttcattactatatatcgtctcatagagaatctcaatctctatccaaggatgtaattaaatgtttgatcgataacaatgtttccatccatggcagagacgaaggaggatctttacccatccaatactactggtcttgctcaaccatagatatagagattgttaaattattattaataaaggatgtggacacgtgtagagtatacgacgtcagccctatattagaggcgtattatctaaacaagcgatttagagtaaccccatataatgtagacatggaaatcgttaatcttcttattgagagacgtcatactcttgtcgacgtaatgcgtagtattacttcgtacgattccagagaatataaccactacatcatcgataacattctaaagagatttagacaacaggatgtacaagccatgttgataaactacttacattacggcgatatggtcgttcgatgcatgttagataacggacaacaactatcctctgcacgactactttgttaataataatctcgtcgatgtaaacgtcgtaaggtttatcgtggaaaatatggacacgcggctgtaaatcacgtatcgaacaatggccgtctatgtatgtacggtctgatattatcgagatttaataattgcgggtatcactgttatgaaaccatactgatagatgtatttgatatactaagcaagtacatggatgatatagatatgatcgataactctactatattacgcggtcgatgtcaataatatacaatttgcaaagcggttattggaatatggagcgagtgttacaacatcacgctcgataatcaatacggccatccagaaaagcagttacagaagagaaaacaaaacgaggatagttgatttattactgagttaccatcccactctagagactatgattgacgcatttaatagagatatacgctatctatatcctgaaccattattcgcctgtatcagatacgccttaatcctagatgatgattttccttctaaagtaaagtatgatatctccggtcgtcataaggaactaaagcgctatagagcagacattaatagaatgaagaatgtctacatatcaggcgtctccatgtttgatatattctttaaacgaagcaaacgccacagactgagatacgcaaagaatccgacatcaaatggtacaaaaaagaactaacgtccatcattacagaaactgtaaagaacaatgagaggatcgactccatagtggacaacattaatacagacgataacttgatttcgaaattacccatggagatactttattactccattaaataatttatcatggagcgataatgtcctgtttcatttgtttccatgacatattacaaaatcgattccgtccaagatgataaaaacatttaccggcatcataaacacggagtttattttatatgtctcgcataaacattactaaaaaaatatattgttctgtttttctttcacatctttaattatgaaaaagtaaatcattatgagatggacgagattgtgagcatcgttcgcgatagtatgtggtttatacctaacgtatttatggacgacggtaagaatgaaggtcacgtttctgtcaacaatgtctgtcatatgtattttacgttctttgatgtggatacatcgtctcatctgtttaagctagttattaaacactgcgatctgaataaacgaggtaactctccattacattgctatacgatgaatacacgatttaatccatctgtattaaagatattgttacaccacggcatgcgtaactttgatagcaaggatgaccactatcaatcgataacaagatctttgatatactaacggacaccattgatgactttagtaaatcatccgatctattgctgtgttatcttagatataaattcaatgggagcttaaactattacgttctgtacaaaggatccgaccctaattgcgccgacgaggatgaactcacttctcttcattactactgtaaacacatatccacgttctacgaaagcaattattacaagtcaagtcacactaagatgcgagccgagaagcgattcatctacgcgataatagattatggagcaaacattaacgcggttacacacttaccttcaacagtataccaaacatagtcctcgtgtggtgtatgctcttttatctcgaggatacgtaataatcttgattgtacacccatcatggaacgattgtgcaacaggtcatattctcataatgttactcaattggcacgaacaaaaggaagaaggacaacatctactttatctattcataaaacataatcaaggatacactctcaatatactacggtatctattagataggttcgacattcagaaagacgaatactataataccgcctttcaaaattgtaacaacaatgttgcctcatacatcggatacgacatcaaccttccgactaaagacggtattcgacttggtgtttgaaaacagaaacatcatatacaaggcggatgttgtgaatgacatcatccaccacagactgaaagtatctctacctatgattaaatcgttgttctacaagatgtctctccctacgacgattactacgtaaaaaagatactagcctactgcctattaagggacgagtcattcgcggaactacatagtaaattctgtttaaacgaggactataaaagtgtatttatgaaaaatatatcattcgataagatagattccatcatcgtgacataagtcgccttaaagagattcgaatctccgacaccgacctgtatacggtatcacagctatcttaaagccatacattcagacagacacatttcatttcccatgtacgacgatctcatagaacagtgccatctatcgatggagcgtaaaagtaaactcgtcgacaaagcactcaataaattagagtctaccatcggtcaatctagactatcgtatttgcctccggaaattatgcgcaatatcatctaaacagtatgttgtacggaaagaaccattacaaatattatccatgatagaaagaaaatatctatatgattggagaagtaggaaacaggaacaagacgacgattactacattattaaatcatgaagtccgtattatactcgtatatattgtttctctcatgtataataataaacggaagagatatagcaccgcatgcaccatccgatggaaagtgtaaagacaacgaatacaaacgccataatttgtgtccgggaacatacgcttccagattatgcgatagcaagactaacacacgatgtacgccgtgtggttcgggtaccttcacatctcgcaataatcatttacccgcttgtctaagttgtaacggaagacgcgatcgtgtaacacgactcacaatagaatctgtgaatgctctcccggatattattgtcttctcaaaggatcatccggatgcaaggcatgtgtttcccaaacaaaatgtggaataggatacggagtatccggagacgtcatctgttctccgtgtggtctcggaacatattctcacaccgtctcttccgcagataaatgcgaacccgtacccagaaatacctttaactatatcgatgtggaaattaatctgtatcccgtcaacgacacgtcgtgtactcggacgaccactaccggtctcagcgaatccatctcaacgtcggaactaactattactatgaatcataaagactgcgatcccgtctttcgtgatggatacttctccgttcttaataaggtagcgacttcaggtttctttacaggagaaaggtgtgcactctgaatttcgagattaaatgcaataacaaagattcttcctccaaacagttaacgaaagcaaagaatgatactatcatgccgcattcggagacagtaactctagtgggcgacatctatatactatatagtaataccaatactcaagactacgaaactgatacaatctcttatcatgtgggtaatgttctcgatgtcgatagccatatgcccggtagttgcgatatacataaactgatcactaattccaaacccacccactttttatagtaagtttttcacccataaataataaatacaataattaatttctcgtaaaagtagaaaatatattctaatttattgcacggtaaggaagtagaatcataaagaacagtactcaatcaatagcaattatgaaacaatatatcgtactggcatgcatgtgcctggcggcagctgctatgcctgccagtcttcagcaatcatcctcatcctcctcctcgtgtacggaagaagaaaacaaacatcatatgggaatcgatgttattatcaaagtcacaaagcaagaccaaacaccgaccaatgataagatttgccaatccgtaacggaaattacagagtccgagtcagatccagatcccgaggtggaatcagaagatgattccacatcagtcgaggatgtagatcctcctaccacttattactccatcatcggtggaggtctgagaatgaactttggattcaccaaatgtcctcagattaaatccatctcagaatccgctgatggaaacacagtgaatgctagattgtccagcgtgtcccaggacaaggtaaggactctcccgcgatcactcatgaagaagctcttgctatgatcaaagactgtgaggtgtctatcgacatcagatgtagcgaagaagagaaagacagcgacatcaagacccatccagtactcgggtctaacatctctcataagaaagtgagttacgaagatatcatcggttcaacgatcgtcgatacaaaatgtgtcaagaatctagagtttagcgttcgtatcggagacatgtgcaaggaatcatctgaacttgaggtcaaggatggattcaagtatgtcgacggatcggcatctgaaggtgcaaccgatgatacttcactcatcgattcaacaaaactcaaagcgtgtgtctgaatcgataactctattcatctgaaattggatgagtagggttaatcgaacgattcaggcacaccacgaattaaaaaagtgtaccggacactatattccggtttgcaaaacaaaaatgttcttaactacattcacaaaaagttacctctcgcgacttcttctttttctgtctcaatagtgtgatacgattatgacactattcctattcctattcctatttcctttcagggtatcacaaaaatattaaacctctttctgatggtctcataaaaaaagttttacaaaaatatttttattctctttctctctttgatggtctcataaaaaaagttttacaaaaatatttttattctctttctctctttgatggtctcataaaaaaagttttacaaaaatatttttattctctttctctctttgatggtctcataaaaaaagttttacaaaaatatttttattctctttctctctttgatggtctcataaaaaaagttttacaaaaatatttttattctctttctctctttgatggtctcataaaaaaagttttacaaaaatatttttattctctttctctctttgatggtctcataaaaaaagttttacaaaaatatttttattctctttctctctttgatggtctcataaaaaaagttttacaaaaatatttttattctctttctctctttgatggtctcataaaaaaagttttacaaaaatatttttattctctttctctctttgatggtctcataaaaaaagttttacaaaaatatttttattctctttctctctttgatggtctcataaaaaaagttttacaaaaatatttttattctctttctctctttgatggtctcataaaaaaagttttacaaaaatatttttattctctttctctctttgatggtctcataaaaaaagttttacaaaaatatttttattctctttctctctttgatggtctcataaaaaaagttttacaaaaatatttttattctctttctctctttgatggtctcataaaaaaagttttacaaaaatatttttattctctttctctctttgatggtctcataaaaaaagttttacaaaaatatttttattctctttctctctttgatggtctcataaaaaaagttttacaaaaatatttttattctctttctctctttgatggtctcataaaaaaagttttacaaaaatatttttattctctttctctctttgatggtctcataaaaaaagttttacaaaaatatttttattctctttctctctttgatggtctcataaaaaatattaaacctctttctgatggtgtcactaaaatatttttattctcattctcattttctctttctctcttcaatggagtcataaaatatttttattctctttctctcttcgatggtctcacaaaaatattaaacctctttctgatggtgtcactaaaatatttttattctcattctcattttctctttctctcttcaatggagtcataaaatatttttattctctttctctcttcgatggtctcacaaaaatattaaacctctttctgatggagtcgtaaaaaagttttatctctttctctcttcgatggtttcactaaaatattttttattctctttctgatgcatcaactatttcttaaacaataacgtccaacaacatatactcgtcgagcttatcaacatcccctatgcccatctaggttaccagacaattgtatatcataaaataatgtttataatttacacgttaaaatcatataataaaacgtagatcgtataatattttttggtatataaatgatctagtaaaatccatgtaggggatactgctcacattttttctttggtacaaaatttcacacaagtttttatacagacaaattcttgtccatatattttaaaacattgacttttgtactaagaaaaatatctagactaactatctctttctctttctctcttcgatggtctcacaaaaatattaaacctctttctgatggagtcgtaaaaaagttttatctctttctctcttcgatggtctcacaaaaatattaaacctctttctgatggagtcgtaaaaaagttttatctctttctctcttcgatggtctcacaaaaatattaaacctctttctgatggagtcgtaaaaaagttttatctctttctctcttcgatggtctcacaaaaatattaaacctctttctgatggagtcgtaaaaaagttttatctctttctctcttcgatggtctcacaaaaatattaaacctctttctgatggagtcgtaaaaaagttttatctctttctctcttcgatggtctcacaaaaatattaaacctctttctgatggagtcgtaaaaaagttttatctctttctctcttcgatggtctcacaaaaatattaaacctctttctgatggagtcgtaaaaaagttttatctctttctctcttcgatggtctcacaaaaatattaaacctctttctgatggagtcgtaaaaaagttttatctctttctctcttcgatggtctcacaaaaatattaaacctctttctgatggagtcgtaaaaaagttttatctctttctctcttcgatggtctcacaaaaatattaaacctctttctgatggagtcgtaaaaaagttttatctctttctctcttcgatggtctcacaaaaatattaaacctctttctgatggagtcgtaaaaaagttttatctctttctctcttcgatggtctcacaaaaatattaaacctctttctgatggagtcgtaaaaaagttttatctctttctctcttcgatggtctcacaaaaatattaaacctctttctgatggagtcgtaaaaaagttttatctctttctctcttcgatggtctcacaaaaatattaaacctctttctgatggagtcgtaaaaaagttttatctctttctctcttcgatggtctcacaaaaatattaaacctctttctgatggagtcgtaaaaaagttttatctctttctctcttcgatggtctcacaaaaatattaaacctctttctgatggagtcgtaaaaaagttttatctctttctctcttcgatggtctcacaaaaatattaaacctctttctgatggagtcgtaaaaaagttttatctctttctctcttcgatggtctcacaaaaatattaaacctctttctgatggagtcgtaaaaaagttttatctctttctctcttcgatggtctcacaaaaatattaaacctctttctgatggagtcgtaaaaaagttttatctctttctctcttcgatggtctcacaaaaatattaaacctctttctgatggtctctataaagcgatcgatctttcttacactctagagtttcctacagtcatgggtcacacatttttttctagacactaaataaaattagtaaaattaaattaattataaaattatatatataatttactaactttagttagataaattaataatatataagttttagtacattaatattatattttaaatattttatttagtgtctagaaaaaaatgtgtgacccatgactgtaggaaactctagagtgtaagaaagatcgatcgctttatagagaccatcagaaaga

SEQ ID NO: 4 - DNA, 534 bp, Artificial Sequence
  Synethic Polynucleotide
atgaacggcggacatattcagttgataatcggccccatgttttcaggtaaaagtacagaattaattagacgagttaaacgttatcaaatagctcaatataaatgcgtgactataaaatattctaacgataatagatacggaacgggactatggacgcatgataagaataattttgaagcattggaagcaactaaactatgcgatgttttggaattaattacagatttctccgtgataggtatcgatgaaggacagttctttccagacattgttgaattctgtgagcgtatggcaaacgaaggaaaaatagttatagtagccgcactcgatgggacatttcaacgtaaaccgtttaataatattttgaatcttattccattatctgaaatggtggtaaaactaactgctgtgtgtatgaaatgctttaaggaggcttccttttctaaacgattgggtgaggaaaccgagataaaaataataggaggtaatgatatgtatcaatcggtgtgtagaaagtgttacatcgactcataa

SEQ ID NO: 5 - DNA, 163 bp, Artificial Sequence
  Synthetic Polynucleotide
atgaacggcggacatattcagttgataatcggccccatgttttcaggtaaaagtacagaattaattagacgagttaaacgagctcgtcgacggatccgctagcggccgcggaggtaatgatatgtatcaatcggtgtgtagaaagtgttacatcgactcataa

SEQ ID NO: 6 - DNA, 175 bp, Artificial Sequence
  Synthetic Polynucleotide
gtgaaagctagagaggggtttttaaatggtcatcggtttagtcatattcgtgtctgtggcggccgccatcgtcggtgtgttgtctaacgtattggacatgtttatgtacgtagaagaaaataatgaagaggatgctagaatcaaggaggagcaagaactactgttgctatattga

SEQ ID NO: 7 - DNA, 100 bp, Artificial Sequence
  Synthetic Polynucleotide
gtgaaagctagagaggaagcttgagctcgaggatccgctagcggccgctgaagaggatgctagaatcaaggaggagcaagaactactgttgctatattga

SEQ ID NO: 8 - DNA, 657 bp, Artificial Sequence
  Synthetic Polynucleotide
atgaattcagtgactgtatcacacgcgccatatactattacttatcacgatgattgggaaccagtaatgagtcaattggtagagttttataacgaagtagccagttggctgctacgagacgagacgtcgcctattcctgataagttctttatacagttgaaacaaccgcttagaaataaacgagtatgtgtgtgcggtatagatccgtatccgaaagatggaactggtgtaccgttcgaatcaccaaattttacaaaaaaatcaattaaggagatagcttcatctatatctagattaaccggagtaattgattataaaggttataaccttaatataatagacggggttataccctggaattattacttaagttgtaaattaggagaaacaaaaagtcacgcgatctactgggataagatttccaagttactgctgcagcatataactaaacacgttagtgttctttattgtttgggtaaaacagatttctcgaatatacgggccaagttagaatccccggtaactaccatagtcggatatcatccagcggctagagaccgccaattcgagaaagatagatcatttgaaattatcaacgttttactggaattagacaacaaggcacctataaattgggctcaagggtttatttattaa

SEQ ID NO: 9 - DNA, 102 bp, Artificial Sequence
  Synthetic Polynucleotide
cacaagttcggatctacgggttcgatcacaagttcggatctacgggttaccggtcacaagttcggatctacgggtttcaccacaagttcggatctacgggtt

SEQ ID NO: 10 - DNA, 48 bp, Artificial Sequence
  Synthetic Polynucleotide
cacaagttcggatctacgggtttcaccacaagttcggatctacgggtt

SEQ ID NO: 11 - DNA, 102 bp, Artificial Sequence
  Synthetic Polynucleotide
aaccatacaacctactacctcacgataaccatacaacctactacctcaaccggtaaccatacaacctactacctcatcacaaccatacaacctactacctca

SEQ ID NO: 12 - DNA, 3021 bp, Artificial Sequence
  Synthetic Polynucleotide
atggatgttcggtgcattaattggtttgaaagtcacggtgaaaacagatttttatatctgaaatccagatgtcgaaatggtgagaccgtatttatacgatttcctcattacttttattacgtagtgacggacgaaatatatcagtcattgtctcctcctccatttaatgcgaggccgttgggaaagatgagaactatagacattgacgagacaataagttataatctagatattaaagatagaaaatgctccgtcgcagatatgtggttgatagaagagccaaagaaacgcagcatacaaaatgccaccatggatgaatttctcaatattagttggttttatatttctaacgggatatctccagacggatgttactcgttggacgagcaatatttgacaaagattaacaatggatgttatcattgtgacgatccacgtaactgtttcgctaaaaaaatacctagattcgatatcccaagatcgtacttatttctagatatagagtgtcacttcgataagaagtttccttctgtatttattaacccaatctcgcatacaagttactgttatatcgatttaagtggtaaacgattattgtttacgctcattaatgaagagatgttaacggaacaggaaatacaagaagccgtcgatagaggatgtttgaggatacagtcactaatggaaatggattacgaacgagaactagttttatgttctgaaatagttttgttacgaatagctaaacaattgttggaactaacgttcgactatgtcgttacctttaacggacataactttgatctgagatatattactaatcgtctagagttattaacaggagagaagattatctttagatctccggacaaaaaggaagctgtacatctctgtatttatgagagaaatcagtctagtcataagggagtaggcggcatggccaatactacgtttcacgttaataacaataatggaactatatttttcgatctatattcattcattcaaaaatctgaaaaattggattcgtacaaattggattctatatccaagaacgcgttcagttgcatgggtaaagtattaaatagaggagttagagaaatgacgttcatcggtgacgatactacggacgcgaaaggcaaagccgctgcatttgcaaaggttttaaccacaggtaattatgtgactgttgatgaggatattatatgtaaagtaattcgtaaagatatttgggaaaatggatttaaagtcgtactattatgtcctactttacctaatgatacatataaattatctttcggaaaggatgacgttgatttagctcagatgtataaggattataatctaaacatagctttagatatggctagatactgtattcatgatgcttgtttgtgtcagtatttgtgggagtattatggagtagaaacaaaaacagacgcgggtgcgtcaacatatgtgcttcctcaatccatggtattcgaatatagagcgagtacagtcatcaagggtccactgttaaagctattgttggaaactaaaactatcttagttagatcagaaacaaaacaaaagtttccttatgaaggcggtaaggtatttgctccaaaacaaaaaatgtttagtaataatgtattaatctttgattataacagtctgtatcctaatgtgtgtatctttggaaatctatctccggaaacattagtcggtgtcgttgttagtaccaatagattggaagaagaaataaataatcagctcttgcttcagaaatatccacctcctagatatattacggttcattgtgaacctagactaccgaacctcatctctgaaatagcaattttcgatagatcgatagaaggaaccattcctagactattaagaacatttttggcagagagagccagatataaaaagatgttaaaacaggctaccagttcaactgaaaaggccatctatgattccatgcaatatacgtacaagatagtagccaactcagtatatggtctgatgggatttagaaatagtgctctatactcatacgcttcggctaagagttgcacatccataggacgtagaatgatcttgtatctagaatcggtactaaatggagcagagttatctaacggtatgttacggtttgccaatccattaagtaatccattttatatggacgatagagatattaatccgattgtgaaaacatcgttgcctatagattacagatttcgttttcgtagcgtgtatggagataccgactccgtgtttacagagatagacagtcaagatgtagataagtccatagaaatagcaaaggagttagaacgactgattaataatagagtattgtttaataattttaaaatagagtttgaggcggtatataagaatctgattatgcaatcgaagaagaaatatacaacgatgaaatactcggcatcgtcgaattcaaaatctgtacctgagagaattaataaaggtactagtgaaactagaagagatgtttccaagtttcataagaatatgattaagacatacaagaccagactgtctgagatgttgtctgaaggacggatgaattctaatcaggtatgtatagatattctccgttctttagaaacagatttacgatccgaatttgatagtagatcgtctcctctagaattatttatgttgagtcgaatgcatcactcaaattataaatccgcagataaccctaatatgtatttggttactgaatataataaaaataatccagaaactatagaacttggagaacgatattattttgcatatatttgtccggctaatgtaccatggaccaaaaaacttgtaaatattaaaacatatgaaacaattatcgatagaagttttaaactcggcagtgatcaaagaatattttacgaagtttactttaaacgattgacgtccgaaatagtcaatctattggataataaagttttatgcatctcattctttgaaagaatgtttggttcaaaacctacattttacgaagcataa

SEQ ID NO: 13 - DNA, 1932 bp, Homo sapiens
atggaggccgtggagaccggggaacggcccaccttcggagcctgggactacggggtctttgccctcatgctcctggtgtccactggcatcgggctgtgggtcgggctggctcggggcgggcagcgcagcgctgaggacttcttcaccgggggccggcgcctggcggccctgcccgtgggcctgtcgctgtctgccagcttcatgtcggccgtgcaggtgctgggcgtgccgtcggaggcctatcgctatggcctcaagttcctctggatgtgcctgggccagcttctgaactcggtcctcaccgccctgctcttcatgcccgtcttctaccgcctgggcctcaccagcacctacgagtacctggagatgcgcttcagccgcgcagtgcggctctgcgggactttgcagtacattgtagccacgatgctgtacaccggcatcgtaatctacgcaccggccctcatcctgaaccaagtgaccgggctggacatctgggcgtcgctcctgtccaccggaattatctgcaccttctacacggctgtgggcggcatgaaggctgtggtctggactgatgtgttccaggtcgtggtgatgctaagtggcttctgggttgtcctggcacgcggtgtcatgcttgtgggcgggccccgccaggtgctcacgctggcccagaaccactcccggatcaacctcatggactttaaccctgacccgaggagccgctatacattctggacttttgtggtgggtggcacgttggtgtggctctccatgtatggcgtgaaccaggcgcaggtgcagcgctacgtggcttgccgcacagagaagcaggccaagctggccctgctcatcaaccaggtcggcctgttcctgatcgtgtccagcgctgcctgctgtggcatcgtcatgtttgtgttctacactgactgcgaccctctcctcctggggcgcatctctgccccagaccagtacatgcctctgctggtgctggacatcttcgaagatctgcctggagtccccgggcttttcctggcctgtgcttacagtggcaccctcagcacagcatccaccagcatcaatgctatggctgcagtcactgtagaagacctcatcaaacctcggctgcggagcctggcacccaggaaactcgtgattatctccaaggggctctcactcatctacggatcggcctgtctcaccgtggcagccctgtcctcactgctcggaggaggtgtccttcagggctccttcaccgtcatgggagtcatcagcggccccctgctgggagccttcatcttgggaatgttcctgccggcctgcaacacaccgggcgtcctcgcgggactaggcgcgggcttggcgctgtcgctgtgggtggccttgggcgccacgctgtacccacccagcgagcagaccatgagggtcctgccatcgtcggctgcccgctgcgtggctctctcagtcaacgcctctggcctcctggacccggctctcctccctgctaacgactccagcagggcccccagctcaggaatggacgccagccgacccgccttagctgacagcttctatgccatctcctatctctattacggtgccctgggcacgctgaccactgtgctgtgcggagccctcatcagctgcctgacaggccccaccaagcgcagcaccctggccccgggattgttgtggtgggacctcgcacggcagacagcatcagtggcccccaaggaagaagtggccatcctggatgacaacttggtcaagggtcctgaagaactccccactggaaacaagaagccccctggcttcctgcccaccaatgaggatcgtctgtttttcttggggcagaaggagctggagggggctggctcttggaccccctgtgttggacatgatggtggtcgagaccagcaggagacaaacctctga

SEQ ID NO: 14 - DNA, 717 bp, Artificial Sequence
  Synthetic Polynucleotide
atggtgagcaagggcgaggagctgttcaccggggtggtgcccatcctggtcgagctggacggcgacgtaaacggccacaagttcagcgtgtccggcgagggcgagggcgatgccacctacggcaagctgaccctgaagttcatctgcaccaccggcaagctgcccgtgccctggcccaccctcgtgaccaccttgacctacggcgtgcagtgcttcgcccgctaccccgaccacatgaagcagcacgacttcttcaagtccgccatgcccgaaggctacgtccaggagcgcaccatcttcttcaaggacgacggcaactacaagacccgcgccgaggtgaagttcgagggcgacaccctggtgaaccgcatcgagctgaagggcatcgacttcaaggaggacggcaacatcctggggcacaagctggagtacaactacaacagccacaaggtctatatcaccgccgacaagcagaagaacggcatcaaggtgaacttcaagacccgccacaacatcgaggacggcagcgtgcagctcgccgaccactaccagcagaacacccccatcggcgacggccccgtgctgctgcccgacaaccactacctgagcacccagtccgccctgagcaaagaccccaacgagaagcgcgatcacatggtcctgctggagttcgtgaccgccgccgggatcactctcggcatggacgagctgtactga

SEQ ID NO: 15 - DNA, 1653 bp, Artificial Sequence
  Synthetic Polynucleotide
atggaagatgccaaaaacattaagaagggcccagcgccattctacccactcgaagacgggaccgccggcgagcagctgcacaaagccatgaagcgctacgccctggtgcccggcaccatcgcctttaccgacgcacatatcgaggtggacattacctacgccgagtacttcgagatgagcgttcggctggcagaagctatgaagcgctatgggctgaatacaaaccatcggatcgtggtgtgcagcgagaatagcttgcagttcttcatgcccgtgttgggtgccctgttcatcggtgtggctgtggccccagctaacgacatctacaacgagcgcgagctgctgaacagcatgggcatcagccagcccaccgtcgtattcgtgagcaagaaagggctgcaaaagatcctcaacgtgcaaaagaagctaccgatcatacaaaagatcatcatcatggatagcaagaccgactaccagggcttccaaagcatgtacaccttcgtgacttcccatttgccacccggcttcaacgagtacgacttcgtgcccgagagcttcgaccgggacaaaaccatcgccctgatcatgaacagtagtggcagtaccggattgcccaagggcgtagccctaccgcaccgcaccgcttgtgtccgattcagtcatgcccgcgaccccatcttcggcaaccagatcatccccgacaccgctatcctcagcgtggtgccatttcaccacggcttcggcatgttcaccacgctgggctacttgatctgcggctttcgggtcgtgctcatgtaccgcttcgaggaggagctattcttgcgcagcttgcaagactataagattcaatctgccctgctggtgcccacactatttagcttcttcgctaagagcactctcatcgacaagtacgacctaagcaacttgcacgagatcgccagcggcggggcgccgctcagcaaggaggtaggtgaggccgtggccaaacgcttccacctaccaggcatccgccagggctacggcctgacagaaacaaccagcgccattctgatcacccccgaaggggacgacaagcctggcgcagtaggcaaggtggtgcccttcttcgaggctaaggtggtggacttggacaccggtaagacactgggtgtgaaccagcgcggcgagctgtgcgtccgtggccccatgatcatgagcggctacgttaacaaccccgaggctacaaacgctctcatcgacaaggacggctggctgcacagcggcgacatcgcctactgggacgaggacgagcacttcttcatcgtggaccggctgaagagcctgatcaaatacaagggctaccaggtagccccagccgaactggagagcatcctgctgcaacaccccaacatcttcgacgccggggtcgccggcctgcccgacgacgatgccggcgagctgcccgccgcagtcgtcgtgctggaacacggtaaaaccatgaccgagaaggagatcgtggactatgtggccagccaggttacaaccgccaagaagctgcgcggtggtgttgtgttcgtggacgaggtgcctaaaggactgaccggcaagttggacgcccgcaagatccgcgagattctcattaaggccaagaagggcggcaagatcgccgtgtga

SEQ ID NO: 16 - DNA, 711 bp, Artificial Sequence
  Synthetic Polynucleotide
atggtgagcaagggcgaggaggataacatggccatcatcaaggagttcatgcgcttcaaggtgcacatggagggctccgtgaacggccacgagttcgagatcgagggcgagggcgagggccgcccctacgagggcacccagaccgccaagctgaaggtgaccaagggtggccccctgcccttcgcctgggacatcctgtcccctcagttcatgtacggctccaaggcctacgtgaagcaccccgccgacatccccgactacttgaagctgtccttccccgagggcttcaagtgggagcgcgtgatgaacttcgaggacggcggcgtggtgaccgtgacccaggactcctccctgcaggacggcgagttcatctacaaggtgaagctgcgcggcaccaacttcccctccgacggccccgtaatgcagaagaagaccatgggctgggaggcctcctccgagcggatgtaccccgaggacggcgccctgaagggcgagatcaagcagaggctgaagctgaaggacggcggccactacgacgctgaggtcaagaccacctacaaggccaagaagcccgtgcagctgcccggcgcctacaacgtcaacatcaagttggacatcacctcccacaacgaggactacaccatcgtggaacagtacgaacgcgccgagggccgccactccaccggcggcatggacgagctgtacaagtga

SEQ ID NO: 17 - DNA, 813 bp, Artificial Sequence
  Synthetic Polynucleotide
atggaaacggatacattgcttttgtgggtacttctgctctgggtgccgggaagtacaggagacgaggttcaactcgtcgaatcaggcggaggacttgtccagccggggggttctctgcggctgagttgtgcagcttcaggattcacattctcagactcatggatacattgggtgcggcaagcacctggaaaagggctggaatgggtggcttggataagtccgtacggagggagtacttattacgcggacagtgtaaagggcaggttcacgattagtgccgacacgagtaagaataccgcctatctgcaaatgaacagtttgcgagcggaggacacagcagtatattattgcgctagacggcattggccgggaggcttcgattattggggacagggtactctcgttacggtgagctcaggtggaggagggagtgggggtggcggctccggcggtggtggttcagacattcagatgacccagtccccgagctctctctccgcgtctgtgggtgatcgagtaaccatcacttgtagagcaagccaagacgtgtcaacagccgtagcgtggtaccaacagaagcctgggaaggctcccaagctcctgatatattctgcaagtttcttgtatagtggtgtgcccagtaggttttcaggaagcggatctggtactgacttcacacttactatttcatccttgcaacctgaggacttcgcaacctattattgccagcaatacttgtaccaccccgcaacttttggccagggtaccaaggtagagatcaaacgggactataaagacgacgatgataagtaa

SEQ ID NO: 18 - DNA, 70 bp, Artificial Sequence
  Synthetic Polynucleotide
aaaaattgaaaataaatacaaaggttcttgagggttgtgttaaattgaaagcgagaaataatcataaata

SEQ ID NO: 19 - DNA, 34 bp, Artificial Sequence
  Synthetic Polynucleotide
aaaaattgaaaaactagcgtctttttttgctcga

SEQ ID NO: 20 - DNA, 39 bp, Artificial Sequence
  Synthetic Polynucleotide
tagtagaatttcattttgtttttttctatgctataaata
